United States Patent Application Publication US 2026/0275333 A1 - sequence listing, part 9

SEQ ID NO: 3045 - RNA, 64444167 nt, Homo sapiens (residues 17,185,113-19,333,251 of 64,444,167)
  source 1..64444167: mol_type = mRNA
acctacaatcttctgatctttgtcaaagttgaccaaaaagaacaatggggaaatgattttctattcaacaaatggtgctggagtaactggctagccatatgcagaagactgaagctagacctcttccttacaccataaacaaaaactaactcaagatcaattaaagacttaaatgtaaaacctgaaactataaaaccctggaagataacctaggagcctagcaaagatttaatgacaaatacaccaaaagcaattatgacaaagacaaaaattgacaaagaggacctaattaaactaaagagcttctgcacagtttaaaagaaactaccaagaaaataaacagacaacatacagaatgggagaaaacattcacaaactatgcatctgacaaaggtctaatatccagtatctatacggaacttaaacaaattaacaagcaaaaatcaaacaaccccattaaaaagtgggcaaagcacatgaacacacaattttcaaaaaaaagaaaaaaacaggctggatgtggtggctcgtgccttcaatcccaacactttgggaggccagggtgggcagatcacaaggtcaggagttccggaccagcctgaccaacatgctgaaaccccgtttctactaaaaatacaaaaattaaccaggcatggtggcatgcacctgtaatcccagctactcaggaggctgaggcaggagaatcgcttgaactgggaaagtggaggttacagtgagccaagatgataccactgcagtccagcctgggtgacaaagcgagaccctgtctcagaaaaaaagaaagaaaagaagaaaagaaaagaaagaaaagaaagaaactaccatcagagtgaacaggcaacctacagaatggaagaaaatgtttgcaatctacccatctgacaaagggctaatatccagaatctacaaagaacttaaataaatatacaagaaaaaatcaaacaaccccatcaaaaagtgggcaaaggatataaacagacacttctcaaaagaagacatttatgccgccaacagacacatcaaaaaatgctcatcatcactggtcatcagagaaatgcaaatcaaaaccacagtgagataccatctcacaccagttagaatggcgatcattaaaaagtcaggaaacaacgggtgctggagaggatgtggagaaataggaacacttttacactgttggtgggactgtaaactagttcaaccattgtggaagtcagtgtggcaattcctcagggatctagaactagaaataccatttgacccagcaatcccattactgggtatatacccaaaggattataaatcatgctcctacaaagacacatgcacccctatgtttattgcagcactattcacaatagtaaagacttggaaccaactcaaatgtccatcaatgatagactggattaagaaaatgtggcacatatacaccatggaatactatgcaggcataaaaaaggatgtttcatgtcctttgtagggatgtggatgaagctggaaaccatcattctgagcaaactatcacaaggacagaaaaccaaacactgcatgctctcactcataggtgggaattgaacaatgagaacacttggacacagggcagggaacatcacacactggagcctgtggtggggtggggggaaaggggaaggatagcattgggagaaatacctaatgtaaatgacaagttaatgggtgcagtaaaccaatatggcacatgtatacatatgtagcaaacctgcaagtactgcacatgtaccctagaacttaaagtataataattaaaataaataaataaaaattaaaagaacagaagtaccactcaacccagcaatcccattactgagaatatacccagaggaatataaatcattctaccataaagacacatgcatgtatgtgttcatcacagcactacacaatagcaaagtcagggaatcaacctaaatgctcatcaagagcagactggataaagaatatgtggcacatatacgtcatggaatactacacagccataaaaatgaatgagatcatgatctttgcagaggcatggatggagctggaggtcataatcctaagtcaactaacataggaacaggaaatcaagcacggcatgttctcacttgtgagatggagctaaacactgagtacacatgaacacaaagaagagaacaacagacatctggatctacttgagggtggagggtgagaggagggagaagatcaaaaactacctatcaggtactatgcttatcaccttggtgattaaatgatccgtacaccaaacccccatgacccgcaatttacctatataaaaaacctacctgcacatgcacctctgaacctaaaataaaagtgttttttaaaaaaatgaatctggtgctcccctccgcagcacatatactaaaattggaacgttacagagaagattagcatggcccctgcgcaaggatgacatgcaaattcgtgaagcgttccatatttttgacaccacctgcagcctctgtaaactttaaagggcctgcagagaatgccatgcttctggaagatgattggtggtcttgtcttcagatgaaaagtatttgtgttgtgataagggtgttggggtaagggactctgtgtgctgtgcttttctctagccaagtggtactataatgagtctaggaggagaaacatcagcattaacaggagacttgctataagaagctaattcatggactcttttcaaacctgcaaaattttattacagtgaggcctagaatatcaaataatttatatgcacattgaagcttgagaggcagagcttagctaagtgactctcagcccagtcttccaataggatcacatggacaatttgaagataaatcatcacctgtgccctccccacaaatcctgtttattgttctgggtggaaacacttctgttttttaaattaagctcctcgcatattacagtgaggccaaggtcaagcatgaggacttccagatactttaatgagaggaactattaacattcaaggacgtggccatagaattctctgcagaagagtggaaatacctggaccgtgcccagaagaattgatatagagatgtgacgttgcagaactacagaaacctgggtgttactgtctgtaacccagacctggtcacctgtctggagcaaagaaaagagccctacaatgtgaagatatatgagacagtagccaaacccccaggtaggtgacagtgaatgaaatagaggacacaggcaaggggactaaggtcaaggaggaagccaggccttaaaatgtagtttgggaagctctgctccaatgaaaataatttctgaaaaggctgcatttttttctcatatacaccaatggggcatcttctgtctcatgctgttaaatcttctaagtatcctcttttttctttagtgatctcccttcaaggttacagggaaaaccaatgtccgctttaccatttgtaaggggctgcatgatctgactgtggttccattgcttttggagacacaggaatatttgtatattgaggagctctatgtcgaagtattttttttcaaatattcgttttggatgatgtctaaaatgtgtaaggtgagtagtggacatattggaatttggttcagaaatcccgggaacactagggacagatgttgtacctcttctgctttgtgatttttactcctatagaggttacaaatataattctacaaaaattcttactcggcaattttatcagaacaataaacgtttttctaaatattaaaaaatgtactgttatttcaaaatgttattgttttagtataaactgagatttgtgatttaaactctgtaggtgcaaattctcaaattaaatatagtataaagcacaggtttccaatgttttggcttccctgggccacattggaagaagaattgtcttgagccacacataaaatacactaacactaataatagctgataagcttaaaacgaagtttcatgaataatttttgtgatatacgccaccatagataagcaaaaaagtccttgcattcaaagggttggtcaccggtttaaagtatctactcaccttctagatttcttaagtgcagtatgtcattaaccagcttagaacattgctaagtgtatattatgctctcaatcattaccgtatttcttaataactattatcttataattttgtcttatttagtaggaagcctaactgagattctgtcatcgagatatatctatctatatctgtataaaaatggctgtcacacacacacctatatgttatatatgtgtatagtaaattcttaacattgttgatagattcttggaaactgtaagtgaagcaatatataattaaagaaaactaattttagggctgggcacggtggcttacgcctgtaatcccagcactttgggaggccaaggtgggcggatcaggaggtcaggagttcaagaccagcctggccaacatggcaaagtcctgtctctactaaaaatacaaaaaattagccgggcatggtggtgggcacctgtaatccagctactcgggaggctgatgcagaagaatcacttgaaccccgatactgacatagtagttaaagtgtttgcagaaaagaatgcagggaatagtttaattacaacttcagcaggggggtagaggttgtagtgagccgagatcgcaccattgcactccagtctgggtgacgagtgaaactctgcctcaaaaaaaaaaaaaaaaaaaaaaaaaagaaagaaaaaagtaaactagttttaccagcgtttaattgatacaaacaagagttacgtttagtgtatagcaatattgtttcatttaaagttgcagttttcaagaacctcttttgaacattaggtgaggacttactggacatctgtgtttgtgtgatatgatttttctgataaataaaagttgcataactatacaaaaaaaagtaaatctggttcatgtgtccactgagtctcctggctccaggccagaggtgaaggacattgtgggaactgtagccttggaaccccacaacagaagccccacactacactgtaacacccatctcctgctcctgtctgtcttccatgtgaggttaaaacacaactggggggcctgttagtgggggcaactaaaagacaccccactagaaccagggaataagacttccattgaagggctcaggaggaagacatatcaggacaatgcagggcacttgcgatggaaatgaataaaaaccatcacgtttttgccaaaatggttatgtagatgcaaagttacagttgggctggtgacccagaacaagcacagctgcaggatgtctcaggaatcctctaagcttcccatcacagaaaccgtgaaatctctgaagccgtccagggagtgaaaaataagctggcacatagggtcacgagcacccagcatcaaagacaggaattgtgttcagaacagcagcagacgcactgcccccttcttcccacagatccaaacatgagagaggagatgtaaagaattttatctgacatatccctttcctgtgattattcacaaattttgccacatttgcatgctgtgtgcagcactcttaaagtatttgcatctttgtttattcatttctttaaacctttttaaatgcaccaccagcaggtcttccagttctaaaaaataaaataaagtcagtgaagtagatgccagtggcaggcaagagcagaaaggccagagaggccagcttttctctcatcatattcgtggtagaagaagttcctgtcaatcaacattgtgatagcatcagtcttaagcattgcctcagacaccagaggctccacacagagatatccaggtgttgcaggacctgtgcaggctgaaaaaccttcagagctcataagcagaaagtcgtctacccttctagttattctagatgggcccccatctcagggggagccccagcagcagaaagccttattaaaattaaaattagctaagaaggaaacaaaagataaacttttcctccttcttcctctttaaagcagaatgagttatccactggattcggaatggtacagctcccaaggaactgtgtgacaggaaggtctgcctgtggccggctgagggaggaggaagaaagcaatgagaaaagctagatcgagaccacagatgctgcagctgaggctcatccagtcaagtctcagacctagcaagagcaacttcccacagtaacatttttaatccctggcagcacttcacattgagctagtaactcttcctttaagagattatataggttttgataaagatgtgaggaatgtgagctggagggctttggacacctggaataaaagctgcaggcaagatgggaaactctacaacttgtaatctgaaaatagtcctagtgatgtgttcctacatgtacatgtgcatatatggagagtgccttttctccactctgtatcttgcataaacaagaactgattgagttggagagtacttttcaattacaatccattccatttaagaattctgagctgtcgggccttcttttcttttaatggagcaaagataagtcatatcctttcacaggaagatgaagaaaaaagtgtgaagataacatcaaagcataataaaatgtccaaagcactgatacatctacacattcaatcttgcagactttgattattaggaaaaatgatcaaggtaacagagaaacgaagaaacttactaagtgtttctcataggtacagattccttcttatctagctgtattaccagacacaatgcaatttgcttttatttactgatctctcttttaagcatcacacgttaaaactgcaagaggtaaagatgaaataacaggtactggatttatttttctgcttaaaacaacccccaaaaggtaaaatttgttgaacaatgattttcaaaatattggacatcaggcaatgaaggacagtgacccctgagagatgagggaaaaaaaagtcacctctacaataacctcagctactaccttgagagagttcccatccttggcagagtaataaagaaccaaggtagaggccagcagacttcctcagtttaaaggatggagttgagggcctgggaaggacaaggcaacagagttctcaggacagagtaccaaagaggagagagatctgcagagggtctcactcaaatattcagcaaagtaccaataagcacatacatgagatttcctgaggccagggaaagaagcattccaaaaggtgtaaagggaaaaggactcaaggccaggaatagtgcctttcccccagccagacgttccagtctcataatttataactacctcataatttatgtgttttctgttcacaaagaaataaattagaaatcaataagagaaagatattgagaaaaataagtatttggaatctaaataataaagaaaatcaatgataataaaattagaaatcaataagagaaagatattgataaaatacttaaatatttggaatctaaacaataaagaaaatcattctgtagtgtgctcaggaggattttgcattggtcatggagaaaaattaactgttcttgtcttgcctaacaaattttaaaagtaagatgcaaaagaataaaagtatttccaagtaaatgaactgcatcctagaaaaaacagctcaagaaaatgtgtagaaataaaaaatacctatcataaaaccagataatgcctgacatccaatcaatgataacaagccatggataaatcgtggaaaatataatctataacaaagagagaaaaatcaatcaattgaaagtgacccagacctgacccaatgctaaaattagcatttgagaacaacaaaacaattattataatggtatttcatatgttcagagatgaagtaaagacatagaaattttttttaaccccagtccaattttctggggacaaaaactataatatctgagataaaaaatacactggatggaattaatggcagattagaccttgcagaagaaaagactgataaacttgaaaacatagcaatagaagctatccaaaataaaagaaagaaaaaatcaattttctcatattctgttgggtagaagcaagtcataagtttcacctgcactcataggatggcatcatacaagggcatgacaatgggggtctccttgggtgggtcaatcacaccatttaaaaaaacagatgtgggccgggcatggtggctcacgcctgtaatcccagcactttgggaggcagaggtgggcggaccatgaggtcaggagatcgagaccatcctggctaacacggtgaaacctgtctctactaaaaatacaaaaaattagccaggcgtggtggcaggcacctgtagtcccagctgtttgggaggctgaggcaggagaatggcgtgaacccgggaggcggagcttgcagtgagcagagatcgtgccaccgcactccagcctggacgacagagcgagactccgtctcaaaaaaacaaaacaaaacaaacaaacaaaaaaacagatgtggcctgattaatataagacaaagtagatctcaaagccaagaatattatcagagataaaaatggtcaggtcataatgtcaagaggatcaattagtcaaagagatatgacaatcctatacatttatgcacttgcttttcgtcatatttattgacatataatttaaatacagtaaaattcacctgttggtatacagttttatgagttttgacaaatgcataacatcatataacataactatcaccacaatggagatttttaaaagttcatgaccccataaattcccttgtacccctctgtaatcagctcctttccccacaccagtccctggaaccagtaatctggtttctgttcttacacttttgctttctccaggggtgcaatataaacgaaatcacacattatggagccttttttgtctagctcttttcacttagcatgatgatttgagatatagccaagctgtttcatgcatcagtagttcattcctttttatttttcattcattctttctttctttctgccatatccacttaagacctctcctactacaatagcaagtgaaagcagaaaatgtgaacatccatgttctgatcttcatcttgaaaggaaaatttccaggccttcaccagacaggctgatgtctgctgtaggtttttggtatagatacgtctctaactgattaaagaagtttcctctattgctactttggaaagtgtttttgtttgtttgtttgtttttaatcatgaatacttgatgtataaaagactttaaaatgagtaaaaggattagtgggatcctgacttccttattcatctgggttaatctccacctttcctcatctttgagttatttcacaattctgaagttgtagaaaactgataataatgtgaatcgtttttacccatgaaatacaaattgagttccagggaatgtaactgattattgccctgggaatgtaagtgatattggccagttttgcatttggttgtaaatttatttcagtatttttcatttaactataaatgtgtttgaactagttgtagcatgttaccagatcctcaataattagtgagttaaatttttgacaggtgctcatttttatctgtataaggatcattttatccttttttaaaattattccttaacaggacatttaaacagtgcttggccagtaataaataataaatattagctcttactacattaattgtattaatatttaaaatgactcttgagtcacactttaagttcatctggggaaggtgtgctctgaggatacactcaagtgtccagtcatctcaagtgttcatccagtcattactgagcacttcccaggaataagacagtgctcactgttagaaatacaagaaaataatcatttctctccccattttctcttccactgtgtggaatgctggttcctgaaaatatctccaaaacaatctgttgaaaagataaacctcagtttatccttctgcagtaagtgaaagcactactttgagagtcatactagcacttcacagaggggcagggcaaaatagggatacttaggagattttgaagtctggtttaaggtgtgtctttcaatggggttggtggttgtaggcttggttaggaatgggcaataatcatgtcaaaatcacttaggattcatgaatttgtgatgatgtgttcaaagacttggggtataaactgtaaggtggtgctttctactgaagaggtgatagatctttcaggaagtttctggaatgaccaatcaagttatttgcaacttcctgggcaagagttgcctagaagagtgatggcatattgttgaagatagtggaatagtgaagctgcattgaggtagacattaagctgtatgggtaaggacagttcgggtctcagatgccatctttcttctgtacttctcatcaagcatctacatttattgtcttattttgattgttatatttctggtgcaagtgtctaaataataatataatgacatgaacaataacaacaactacagcaaatgttgtgtgtattttaggcttacttgagtcacgtcccatcctaatctttcagaaataacctctgtaattccaaaagcagccctataggataggactcattatctccactttatagatgaggaaattggggttcaaagagggtaacttgtgagtcctgccccccaggccacttacatcctcaaggcaattgccaatcctgaaaacagagctgatgatccgaaatgcactactgacaacctcatcaggttaggagaatgcatgccaaggtcctgggcctgtcaaggtaacccccctggtttcggtctaagattccaggagtcagggtgaaatgaaagtaaactagctctgacatagactgcagactgctataactcttctgggtaatccaggaaattccagaccctaaagctggattaagattatccctgattactagtacctataggtacctagaaaaatccatggaaaatctttggagaaaaaaataagttctatactgtaagttatttctacaaataatttttaaaatgcaatatccagcacatagtcaaagacagataaacaaatacacaaaaagacaagacactataagtaaagatcagcagaaacaataaacaggaataagcaaaaatacatgaaaattgaagaaagcgatcaatgtgtgggtaattctaagtaacaattgactgtataagacagtaatgatgataatattatttgtaataatattatgtacatcataaagaatcaagtgagagcaatgaaactgtccttcaactctagagttacatgttgaatcatatggtagatactacaggaccaaggggcagccagccacggtccatgagccacgtctggcctgtggcctgctcttttttatgtcaagcaagctaagagtgtgtgtgtttttttacatttttcaaggcttattttacaaaaaagaaagaaaaatatgtgatagactttatatgttctgtaaagacatatgcatttactttctggtcctttacagagaaagtgtggcccttgctatggagaaatgacaatgaatgaactgcagtgacacacaacaacaacatggatggaccttcaacacatatcactgagccaaaaagagcaagatcaaaagaaaaatctctaatatgattccactggcataagttttgaaagcagacaaaattatagtttgaggatccactctttggtggtgaaactataaaagaaaacaaggaaatggttaccataaatatcaggagaatggcacatctaggtgagagaagggaatgtaattggggaaggggcaggtggagaagtgagctttagagtagtggcaatgatctatgttttaatctgcatggctgttacttcagtgcttacaataatttgttaaaatgtatatttatattttgtgcattctttctgtatctgtattccatttcaaaataagaggggtttaaaaggtaaactttatacaattattttttaaagtggaggaaaagagggaaggaaggagggaagaagggaaggagggagggcaggaggggaggaggggggaagtactgtaaaatttggtccaccaggcaagatctatgttcttcatctaagtgaaaagtaaaagatgttaagcaatattttcaacgacctcttgatttgataggtaattttacaagaactgactgcccatttgtatgtttttaaagcacttggcttaaagaaaaggtcaacgttcttactgtgaataaaatatttatgaaagtagctgtggcttttctttctttgtttccccacctgtgcccagacaccccaccttgcaatgtgttaatgacctaccttgcccatgctggtcttagtgcctttcaggggtattttcaccacatcctctctcaaagaattgagccttttttccacggttgtcaaggctttcattctttttctatctcctctttttctctgaaaatattccacttaccttttcttccctaacaggtggtaagtatagtgaatgacaattttttagaacatgtgtcacaaaaattgtggagctgccatattgcacagctccagcaggagcattcacatcatggcaacttcctctagttgtggagtgcccagaccatataaaacaggcagcagcctggccagcactgcttgaaggagttgggattcagatttctacgggtttagggtaaaagggaatgggttaagtccattgcatagaggattcaagttaaacaacaaattaacttcttgctctaaaaagaaggagcagggcatttgcagtgctgttcataatgcaaagctacatctgattcgtgtatctcctaaacttccatatagattgttggagttgattttcacacttaaatctaatagcagtaaccacagtaacttacgtttacataaactgcattagatctaggtttaggttgagactctgactcttactgatgtgtgagcttcagcaagttgcttaacctccttgagcctcatattcttcatcctggaaaaaaagtgatgatgataatgataagggtaagtacctatcatacagaatgaagtgagaaatacacttaatgcacagtgcctggaacattagataatgttcttattatttgttctctgaccattcctgcttccctccgaaaatatgtcctgcaatcatccagtcctccagttcagaccccaggagtgaccctctgcaccttctaatccctcagactccccacacccatctctgccctatccaccaagtcccatccaagaaccttaattcccacatatttgtattagctctcctcagactctcccaaacctcttgtgggacacttaccgcctttactgtcccctctatttactcatccattgattcattccttcccccactgttatattgagtgcagagtagctggagaagacttcttggaaaaggtgacatctgagcacctgggtcagctgaaggaacaagcatggagatttccagagaaaaactattctaggaagagaaaatgatgtgcacaaaggccctgagacagatgagtttgaggaccagaaaggaagcagagaatccttgttgagtactaggagatgtggttctatgtaacaggccttctctgggttccatgaggagccattgacaggtttgagcagaagtgtgacatttttggagcatcacactctggaggcaagattgaaagcaaaaagacaaggtaaaagagcattgcatgggtccaggtagtgaagactaggatggtaacaggtggtcattctaagacacgattctgatcaggtcactctccctacctggcccatgcacacaccacacatacacacacttaaaaccagccagaattttccctcgcctgtggaataaagtccagactctggacccctctcccaactcgtgtcctacatgcagtcatgattctgtgccttcacacctctgttccctccccctggaatgctcttccctcccttgtctttccacttattcttcaaaactctactcttatttgagctccccttagaagccatccttgatcccattctctctgctcttcccaaaagactgaactgctttctcctctgagctgtctttgccctctgtgccataaaactattatcacaattatcactgtgtcctgtaataagccaccttcatttccaacctttcatcctgtaggttgtgagcattcttatgtgaagtattcccagattttaagtttttctatcttgggccctttgcacaataactggcgtagggtatgtgttgaacttgtaactaatttaatgccattgtaagtagaatcttctttctggttaattttttcaagtaaagcagattacctcaggttgatttgctacatctttgctaggatgtcaaaaatgtctgttgacatctcttttgatacttttatctcaccgttcatgtgtcaactgccagttgctatgtgagctctgattctgaatttagcaataaatgctcttcacattacttttctctccaccgtctatctcttctgggctttgagttcaattcgagcagtgaactttgagttctctgacatcagacttcttgacctccagtcaatcatagagtaactcctccctctcaatcaaaaccaaataaaagttatataccctagttgagtcaacttgactgcagccttaagaaaatctcaccaaatgcagccttacatgttctgacttgaaatacatcatgtgtttcccttcggtccttcagcaggggtttgttctatttcagtgggcactaaaatactgtctttcacagatatttcgccttggaaatttcatggaaagttagtagagtgatgctaccaactgtgtgatatggtttggttttggccttgccacaattcttaaggcctgatgtgaatttcatttcctattgcttatcctgtgtgtgttaactttctgcttggtaaaattgcaagttcccaatgaaagcattctacaattgattagacctgggccacctggcaatttctttctaatctcttttattgtgctttccataaaaatgacagccctggtataaatcctagtttaaatcaataccagtaagtgctaatctcttcacagcactggagatgaaaatgtcaaatggtacctgctgggcattagaactcctactgtaaatcatcaaaaattaaagcaacaccaaattgattttattttcctcttttaaaacatcattttagattcattattttttacagttaagttattcttttttctttttgcttatgctctggttagatgagattgatgaactgaatttggcatggcaaatgtgttgatgtcccatgacacaatatacaagatccatacctgaattaggaagagcctgaggatgaagttgatattttagagtgtgatgtatatatttaagtgacattttaatccttcttcatgtgataacaccacgataacatggaatcttggttgaagaagctaaaccacaagaaggtatctagtaaaactacagtcatggaatagaatttctagtcctttgtagcccctccttgagactattgtcaaaactaccacaagctacactaaaggatgctctcagtaggagttagctgcctggaatctgagcatcttaacaacaagatatagaaaaaaatgcatagataaattgctaagttttcaagtgatcctggaagaattgggcaatagtttttaaatccaggaaaaacttaactaagaatcttgcccagcttcctacactagttattttatcaaataagaaaccaaaaccttgggaaatttagtgacagtcatggtcacaggtttaaaggcaatgcagtagatctctagatatttaattagggtttcttcttgtttcatcacagagaaaatacaaggactacacccacattgagcatgggacatggaaaaatctgatgtgtgtgtgtatgtgtgtgttttcataaaaatagttaatactcagagaataaagtcttaatatgtgctaataaaatggaggagtgacaggaagaaacaaatgttacaaagtgaagacttaatttaactatagatgcttcatgacttatgatggggttatagccagataaatgcatctcaggttgaaaatgcgtttaatacacctaacctaccaaacatcatagcttaactagacttaaacatgctcagaacacttacattagcctatggttgagcaaaatcattgaacacaaagcctgttttataataaagtatcatatatctcatgtaatttattgaacactgtgctgaaagtaaaaacagaattgttgaatgagtatttgaagtatgatttctgctgaaggcatatcactttctcaccattataaattcaaccatcgtaagtcagggactgtctgtagttagtttcagatttacttctagacaaaatactttttatgttgtgtggttctcttccatctctcatagaggatgctaattggcaaggaaatgcttaagaaatatgtaagccaaaggagtggcagaaaaagactcattcagttatacaaggtagtcatcaagcaaggagcccacctttgcataatggagaattcgggacagtttcatgaactgacaacaaagatttctccaatccttgcttagttcatcaagttattcatcagtttaagttcattaacagtactaactaaagtgcaaggccctcaaaattacttgtctttcctccatcagtttaagtcttgcaaggccaagcagataacagaaatgagcaatgtggactcagtagagactggcaaattgtgaagcatatggaaaggaaatagcctctgcctagctcttacaagctgggagcaggggagaatgaagacacaatgtaactagctgagctcacttttgcagagatgccagaaatccaaaaattgatgcaaattataaatttataaatttgacaattcaaaatcatggaaacacatctggggctgctaatgtgagagctttaactaagaacgagaaaccactttagggtttaataaacaggaaagggtaaaccatggaaggttaccagtttcagggacacctgtagtttctcttaacagtttccacttaccagtgagcaaatggtcactgatttcagaggtatgtgtcatatagaagaatgaatttacatcagaaacagagaggtcagcgtctgattgcaggttctgaagagaatgctacagtcagtgggatgaacaatgataggggaatcagactggagttgccactagttaagctatagaaacctaagtgaatcactcaacctctcgtgaagagtctttctcatttgtgaattttagattaaaaaatacctgatttacctgatccacagctttatcataatagacagtgaacaggaaataaaaataaaagtttcattacagaagtgcgtaagagaattcacatcctgatcccctccagaactgaggtccaaaattcagaaggaattagaacttcagtgtgcattctgagaagaaacacaaaggcatagaggatggaaataagaatactgaggaatggtgaagtggacaatgtccgagctctctgcccagagccctcgggaacccgtttttatcatttctgtgtgccgcttcccagcttttgtgtccttttacttctaaaagctgcagtggtgccgcttacggtgactgctccaacggtatgagagctgctttgcttatacagggaacctggggtttgtactcccatgatttggtccttagccaatggcagctccctcagaacaaaattctaggatgtaattggacactctagagccgccctacaggaccaggctgaagtgaggatttttcctgaaatcacaacaattgctttacttctttcctttccttgtcctgctttctccactcccttatcagagtttgtgggagcactcattcataaatcacgtgtgaatccttctctttcggtgtgcttctaagagtctgtactaaaacatccacacatttatcgaaactggcttactttattaagaactatgtttccattaaaaaataaagcatgtctactgtaagcagcaaaaaaagaaaaaaaaaagggaaaaagctacatttttcctgcaaaaatttaagacatttttacaaataaaacaaacgtttgtttcagagctgaggatttggggggtggtgtgtgtaagagttacacttcaaaagctacataagaaatagttgcatccttcatgacatatccaactaaacagtaatgaatggtgtaaatctcactgtgcaactagctgtatttaggcattagacaggatataatggccaagagacaaaacagaacaaaaactgtttcaactaagacattaagggtgagatgttactatgtaaatcaagatctatcatttcttgtatttggggatcagatatgttacttcttacaaacaaagagataaatagggtaacatttacaattgtgttattttcccatatcccaaaattaaaaaaaaaattctttaacatcacaagctacatcaattaacaaattccactgtaatttacaaatgcacagatacataattgggctaacagatatttatgaagctacttgtaacagaaacagtactaaaatcataacacatttttcaaaaataacttagttgagttctttatatccggtgatatttcagatacatttggtaatgagtgcaaaaatcagtaagtaaattaaatctcaggagtttctactttgtgcttaagcactgcgggctatttgttttattttagtgatctgttcactaaaataaaaatggaggtatatcagaactgaaaacagtattctcatagataatgtaattttaagtcttttttattcgaagacagtataaataggaagaatattgaaaagtgaaaattatcttaggctgttgaagaatatcttagcatgctgaaggactttggcaagtcatattgtaggtaacttccctcaattatggtaaacaactgattttctaaggccatttttaaaatacaagtaatttagtaaatatgagcccaagttttgtatcataggaaaacttttgcctaaaaatctagtaagaagatggaatatcattttgaaacttaaaacctagatgcttatatccaataaaactaaaatttaattgcaaaacaaaatatcagtattctcaggtacatgaggtctcagggagaatagcatgctacaaaagcactgagacattctccagaagagagaaattaatccgacagaaggcaacggtctatgggaagaaagactgtgcaatgtttatttctaattaaaaggtaataaatgagtatatctctaagaatattcgatcaaaattccaaataatcccaatgtggctggaggtgaagtgaggaacaaaacaagaaattgctattcttcttttttcctccagagcaatgacacagttattgacagcttcagacattgatggagacaaatcagctgggttggtcttaacatgttaggagaaagcccctaaagaataaaaatagtgctgcactttcaaatcaatagcatagcattaaaattatttttataaaagaaaaaagttcaaatacaagactattcgatatatggatttaaatcctttatttcataacaatgagcattagctgaagtatgtgctggtcaccttgattttcaagacatttaaaactatttcatcttaatttgttattttcaactattatcttggggtatgtttcataatatatataatgtattactacatatatatcgtatacatacaccgtaggcacaagtcaaagtattttacagatagaaaatgtgatcaagaaaacatagtgtacaggataaaggccaactttctctccttggcatttacagccccttcatattctggccaaaaatccatttccagcctgatgaccctctatttcattcactgacacctcagttctaactgagacatctccttgggcatcttattgccctgcattgatattccctgcatcaatcttctcacgtctggggcctttcttcccttcctggctcctatcaaggtttccctcgctcaggaagccttccctgccctgccatgcattagtaacacactaggccactgaatattcagtgtctaggtttcagggagggtcttgtgatacattcgtgatttgcaaaggtatgattcatgattgcaaaagcaatgtcttctctgcgctgatttaatctacagcactttcaaatttcagccaatggttaccttgtcatgtatccaaactttctcctcccagctaaatattgagctcccaggggtatggacagaccatggctgatgcccttctgagtgctttccccatgcggaaagagacacactacagaaccataaataaatatttgttaatgaaaaactgacttgtggtcagtttatttatccagaggatgtaatgagcctcatccttcacttttcccatgagtgtattgctgactacaccctacggaaattggggctttaaggcaaaacctaatataagagtttggagatctggagaccttgttttgagtcatagtctgttgctgttaaagtccacaaagcctgttttctcaccaacaaatgagataataatgaccaacgcatgcagttgtaaggattaaatgagaaaaataatataataaagatgcttaagatgtctttgttgttactctatgttcatctccaaagcagcttctgttaccaatctttaaccaaaactcaagataacaatggtttgcatgctatcaatttcctggagattagagagcaattctaattggaaggtgtccagcagacctaaatggttctagagagaaggtccctctgtcactatgaaaagtaaaccgtaagtcccttatgccccctagttagtagcttttgtattctaatgagaaaagtgaagtttagggtctcaatccaattctacaatcatttgttgagcaattacaaaatttagaaatcactggttttgcctttacctctcctccaagccaggcaacccacactctctcctctgcctccctttaaattctatcccacattcgattaaagtacttgcttttctacctgccaattaacagcagcttttgggcttgacctcctctgaaggcattactaggtcctcctgttttcctcctacagcatccagtggaagtgccaatccagtacagaccaccacgtggtccatgctaaacctcatgcaaaggcaggggcaatgtggatgggagagaagaagctttaaggggaagaagggcgttaaagttgactttcctcaattttcagattccattatgaggattccatccacatagtggagaggagtttccactgctggaaaaatagaaggatggaaaccatagtattgaaaaaatgattcattatttaaaggaaaagcaaccggccttgatttaagccatgctgagggatgctcagcctcaaggcaaactttctgctgttcagtttgtgtccactgatcatgaacccagaagcctcagattgcatatttgtttaagcctttctttttcattttccctcccttgatctgaaaagctttggtgattatacagattgagacagaattctgtcaccagaaagaattgtgttctttgttctgtggcttctcttcattagatgtgtgtgttgcctttataaatcccaaagattgtttagcaacctgagactgtgatccgagtgggtgatgcatgtcatgtgctttattaccatcaaactcaaggacgacagaaaaaagaacagtcacaatctgtttgttggaactgttgccttccccttacccagagccaacacgtagcttctcctgtcttccatgctaacacaggcaaccaactcacagccaacgagacaggaataatgcagggtggatgcaggagaatagaaaactccaggcagcagtttcacatgactagcaaaaggaaactattgaaataggttcagaagctagggactgataagaccctgaaaaaccagggtgtaggccaaaccggctaagacaaactggatgcaccatggcactggatttgatataggacctcattatatgcttgtgaacatattgaatcacatacccaccagtgcggtaaagatacaagcccgaaaacctgcagcgtgactcactctcttgatattcaagtgcatgctaccctttactgagtgtgtacttttactttgctataaatctcagttctttcactattttcaggcgtatcttgaattccttctcacctaagagcctggacaccagctaaggttgaggttgcactgacattcggggacctcgtccagcccatcggtatcatcagaatgctcttttcccagtggtaccaatgtagtgatatgaaaaagcaactttcctgccctgccatgcattagtaacccactaggccactgaatattcagtgtctaggtttcagggagggtcctgtggtacactcgtgatttgcaaaggtaactatggatggtagattttcaaaggagttgcctttaccaaagaaatataataaagaaaattccattaaaaaaggatacaataggacacagggagaaagtgaaaagcaaaaaagatgagtttctccaataacagcctttcttgtcttcttaagggaagctggaatgcttgagggccatctgcaggaaaatttattccaattaagcaagtcttttttagcatctttatgcttgtgtctgcgagcaaaacctttgaatggtggtataattctctgcccataggtgttttaatttaatagcacctagcttaattctaagctcataggcactcaaaaaataagtaaatgattgattcaaaagaattgtatcacttggacttaaaagaactctcagagaaactgatgcttaaagaggttaagtaaccatctcaagggcatataactgggaagttatggaatccagatttgaatccaagtgtgtttaagaagcacacgctctttctcctgattgtggagataggactaataggggcacaatatcatggtcaagagcgcgggctcaagggagtgttcggtgtggcagactccatgcatttgaattctgggttcacaacttagtagctcagtgatcttgctcaggaaaacaacctaatctctttgtgccttaattttagcatatgtaaaatggggataagaaaagtatctacttcaaagcctcatttcaagtattaaaggagttaacatgtgtaaggaactaaaacagtgcctgatatatagtgagtactcagtggatcacttcagctattttacatgattattgaagtcagggaatacatttcatccagtaataaaaccttcaatttacattataagttgttacgtgctggatctcttgaaaacataatgcacgatgagagagtagaggacagtgactgaaaatcatcacaatcttcctttgcacaagaatgatgcattactatcatctccatcaccacctcattttcattatcttcaccaccaattccatttcataacacatttgcttcatgtctcacttacagtcacaaacttctttgatagacaagaaagggacccatgttgagatctacattctcaaatcaggttaagagggacagcgatgcttatttcactgtctatgtgtttatacctgattctttcaaccagggagacagcctgacccatggagaaagcacgagtcaaaggtcaaatgcatccacctgcaggtcctgtcactgaccacttagcatcccacaatatcactgaacctcagtttgctcatacgtaaaataaaattttaaaaaatagaaaatgtaggtagcgtgtctagctcagatggctctagtcccttactgtgacccaaccatttctaatttggcacaagttacaataaaaaacaagcgtgatacttacctggcagggcaaataccatcatcacaaaggtggttttcccagggtaagccttatccattgcactctggatgtacaaactcctgcaatttccccaaatatgggaaactcgactgcatcatttgttgtcatggggactgcatttgcactttcccctaattttaaaaaaagaagacaagcacaattcagataagtaaaatagaattaattaaatgcacgaaagagaggaataaccaaatactttgagagctgagctagttcctataattaggcaatattcatgactctgagcctcctggaagtgagggcaaaaatggaaataaaagagtttccccaaaaggaagaagcataccaatgcttcaaaagaaataaagtctaaactgacaacaggtaacgagatatttctcatgtaaaaccttataagggtaacattgagtgccatgatagataggtcttctgacatcagtttcatttaaaaaatgcaggccagatttttacttggatgctttaaaaaggaacttggataacaactgagaggttaacatcaaaatccatttcagttcaagtgattctggaggggattaagctgatatggtctcagaatgatgcctgacagtaattaaacataatacaagtgcagaatcaggaaagcataaccactctgagtgctatggaataagaaattttttataggaattcaactttacacaattgtggaaggtgctagagaataagggtccaaaaatgggagttggagaatcaggggaaggtcatcagccaggcctcctggagcactgacaccaatggacacatcagaggtcccaggagaacttagaagccaagcatgcctaacaaccagagtgggcccctagccgagctggtggaggagtttatggaagttcttgccacttcacacatagtgcctttgtgagtttgcagccaagaatccagtggtcagcctggagttgctcttggtcaacagggctaggagttaatagggagagttggacatgaggttgggagaggcagtggtaaaacagaacccacctgtgcacctgtctctctctgcaaacgacaaccatgaccttcagacattgtaactgtgtcctcgcattgcttcttcaaaccaccacaaagttctctttggccaactgcagtctagaaacacacaaagaaaaggattctggcaaacttagtaacaggtgagccaagtgtttcctgaacaaaaaccatgcagaactgcattccagccagcgaaaaggagaaagagaaaaaatggagaaataagctaagggtgacttcctcccttctcataggattgtttttgtaagctgctcgtggcatttcttccctcatttcaatggccagcagttaaatcattctgtggccatatatcatcctggttttcaggtaaaattccaggacgtggcaaagaagacccagataactgcgtgctttaatgcttgacctaaccaaaacctctggactgcattgaaactgattcaccttccatggcctgtctggatctagccaagtcaaaagatatacttgaataaaagtgactaacacaatggcaacccagcccaaaatgaggcttctaatgagagggtgataatactaggtggggctgaaaaacttggtcttctagtcagtaatatgattatgcttataataatatgataattttactgaggattcactctatacaaggcactgtgtatgttttatcctatttaattcccacaatactaaaagggttcacaaaagactatatggagtcaccataagtttaaaatcttgctctaagtcacacctagattgctaacaaggaccaatctaggttttgaactctgacctgactgactctatcacactcaccctcattttccttgtctcctcccacactgatgtttagaaaagcaacagagcgaagtgctcagcatgaaggagaggcattatgcaaattttaactcttaaaggtattcgcaatttgcccaactatatcatgagtactggcttttacctggtgtgtagctataatgtgcaagttgcatattaactccattccagagatgatctcatggctcaagattgctgctctggctccagccatcagcagtagctctcagctaatgcaggtggcatcaccctccccacttcctcacccttccagggttgcataatagtaagatgagtaatttgcttagagctcccacacactttgcaaataacatcctgagtttcagaattcatgtcagtttgcctgtgaggctaaacacttgaagtgctcctccttcaaagtcacataaaccataaacccagtcctgagagttggtcttttggccaggaccttatatacctattgatctagccacttaaagacatctttgttaatatattgttcctaatgctgttgggtaattgaggtctttgtttttcaaatgtttatttatttattattttaatagacaaattgaaactttaattgacaaagtacaattgtatatattttatatcatttttgaaatatgtgtgtaatgtagaataattaaatctagctacttaacagatgcattacctcacataattaccatttttgcatgtgttgagagtgcttaaaatctactcatttaacaattttcacaaaggacatgaacagatacttttcaaaacaaaacatatatgcagccaatgagcatataaaaaagctcaatatcattgattgttagagaaacgcaagtaaaaccacaaagaggtacgatctcataccagtcagaatgactatgactacaaatttttaaataacagatgctggtgaggttgtggaaaaaaaggaacacttatacactgttggttggagtataaatcagttgaaccattatggaagacagtgtggcaattcctcaaagacctaaaaacagaactaccattggacccagtaatctcattactggatatatacccaaaggaatataaatcattctattatgaagacacatacgtgtgtatgttaattgcagcactattcaccgtagcaaaaacatggactcaacctaaatgcccatcaatgatagacaggacaaagaaaatgtggcatatatacaccaaggaatacaagcagccaaaaataaaaccacaaaatcaacaacaacaacaacaacaaaaaagattatgtcctttgcaggaacatggatggagctgctggagggagctggaggccattatctttagcaaactaatgccggaacagaaatccaaatgtcacatgttctcacttacaagtgggagctaaagagaacacatgacacagaggggaactacacacactgggacccactggaggttggagggtgagaggagggagaggatcaggaaacataactaatgagtattaggcttaatacctaggtgatcaaataatttgtacaacgaacccccatgacaggagtttgcctatataacaaacctgcacatgtacccctgaacttaaaagtttaaaagaaggatacaacatgattaattatagtcaccatattgtacaatagatctcctgaacttattcctcctatctaactaaaattttgtaccttaaggtctgttcaagtattaggctctggtgaacaggtagaatttttttttttttttttttttttttgagatggagtcttgctttgtcacccaggctgaagtgtaatggcacaatcctggctcactgcaacctccgcctcccatgttcaaacgattctcctgcctcagcctcctgagtagctgggattataggcgtgtgccaccacgcccagctaatttttgtatttttagtagagacagggtttcaccatgttggtcaggctggtctcgaactcctgacctcatgatctgcccactttggcctcccaaagtactaggattacagccatgagccactacgctcagcctagaattttttcctgattgtgaaaatatagcctctttttctactaatgggttcaaactaccaatgatctggtctgaagcaggttaaaagagtcacagtttttgttttgcatcctccatagcaccattatccaaaaatgatgaccaaaatcatcaaaatagacccttagcaaagattccaagaactcctaaagacagaccaattttcaaaataaaatctgtcagatgcattttgctttattttgtttatgagtaaagaagtatctaataagtcaaacttctggtaggggaggggcatctgttggctaaaagcaacatatatgttaagtccaaagcctgtgccaggtgctttgaacctacttttgctttaaaatatctgatgaatatttaaggatggctacatcacaggtttgttctagttcacctctactatatgaacaaaccatcacagagacggaataattctatctctagtcttccatgttttttccctctaacatttcactaaactataccaattaatatttataccacattatttgaatgtggcctgtgtattacaagtatttattttgggaccactttaaggaaatttccatagttacattgttgtgtggtctatttattgatgctcattaaaaccaatgtaactggaaaagtatttttactttctataactaactcacctgctttccctaaagagtgcctcctactaactccagagcaaaagtactcctgagtatctttatgggtttgatatgtaggtttgggactggaaatttgagggggccttgagttccacgtctcagttaatgaaattctttccagactagccaatcagcacacagaaagcccagcaataaaggcaagtaaaactgagtaatctccagaaactttcagatgccatggggaggattaagatttctccaggccaagcccagttagggtttggaacaactcaattcgggtcccaaggactttaataaaatcttctgatctctgggtcctttttatttatacatatattcatgcatgcttatttaaaacccaaaataaccctgtggaccagatagctcatgtattatttttgataaaaatctgggtaccaaaaggttttgcagttcatctatcaccattttgataagggcgacaatctgtgtcccaagatcctttaatattcttgtcatcgaacccagagacttttccaaaatcagaatatgaaaaacaagaggtagaacacaaggtgaatttcaagtgcttgcatttccaagtgatgattgttggaaatgtgattgtaagtctgtactgtgctttttaataacttgattgtgaagctggaaagacacttcctgcctctgcttggtggtctcattagattaccattctcctcaatgttggcaatttattgcagtttccctttcctatctttacaccattcattccaatgcagggaaaagatttcaaaaaccactgcaatgctcccattagtattaaatcttacactttaaatttaagttatttaatatcaaagctgtgaaactgccagatggatagatttttcttattgattatacatttaataattttatgagaaactacatatttatttctgttaagaatgattggattgaagatagcttaaagaaaaaaacagcccaaattccaccactattcaatacattcatgtaacgaacttgcacatgtacccctgaatccatgaaaataaaaaataagacatttttaaagacctatttctttggttagtgttcttataatcacagagtaaaaccttatttttaagttgtgatttcttccacacgtaaaaaaaaattctttgttgtatcagctaatttattctcatcctattcattttaataattttttctcatacttggaacatatcattacataaaataatcaccttttgcccaggataaagtaataaaagaattagaagaaacttagcccaaaatttatgcacagacatttggagtatttccatcttgtgaacttcagatttattttcatcctggcctcttattttgaaattgcttctcagagtcatcacatttgtgcctgtcttcatggtaaattgtttttagcatagcaatattctcagatcaattgctggtggtagtaatgttagtatcaatcatgtacaaacacgtaatagctgggagacaaatgagatctacctctccttcttcttttagccaggtacaatttgctcttctgaaagatgtctttactacaaagtaatatcctgggaagtctgaaaacacatcagttaggcactaagaattctttcagcccacctggtctgcagaggcaggaaggttcatctctgtgaattggccaaaaccatggacagatcctccatactactgtaccagatggtggttctgagtgctgccatggagaagggtcctataacttctatcctgccttcctaagccttcatatttttctccttcagtaagtccttctcctcttcctcctcctccttgttctcctcctcctcctcttccaccttttccttttttgtaatttcctagcccttagatattaggatttcctggttgttcacaatttgaattctagttgtttggccctgaggacttttcccaaaattgctaatggattttgcaattttttccttgcctcttaatatgactttcctttgtattatttcttttgcccaaatatatgtcacatttttgttcttctaagttgtgttcttctgttttgttttgttttgttaatgttggctactgtgttcacccagccagcctctcagaaggctgtttttgttatattcattacaaatgctatacttaaatatgtcataatttgaatgtaaatgtatcccttgtatagcatgtgtcatattttacataggtgatatgtcagtcaggatgtcagtatgaaagagttggtttacacagatggagtaattgaggagagtctgttgagggactacttacaaatgtatggaagaataaagcaaatgaagcatagtgaagtccatgggactagcaacagattggagtcattatcctgctaggcctaaagagacaagggaatggcaaggttaatggaatctggagagggctccctgatgggagctacagcatttgggacaggaatgaagttagtatgtaatgagccagcaggaagggagcctggaaaatgaaaatcctgagatgactctcccacccaactctccaagtttttaaatgcacttcctgttggctgaatccagtgggaggccataaagcaatgaatctcattgatgtggtccataaaagccaatctccaggcacagcacacagtggagaaccatggagaggagatctgaagggaaaacagaaataaccagacacatatagtatgcattgttggatctacaaaataatgttgaaaaaattgcagaggcattataaacccaatatgatctatattgtagaacccaatttatccatattgaccacttggtacttatagcaagtgactgatcttcaggggtatcttgctcagatactttgtcctctcttgaggattaaagccaattattcatcatgagattcctcactcaatgccactcaccactcaaaacattagacaaacatgaataggtaatcgtcattgcctaacactagcatagcttggaaaaaccttcaggtgaatatattcagccatacgtgaaaaagtaacatcatgttctaccaaatttttttcctcaatttatttgatgatttataacagctttcaaaactccccttgattgaggttgaacataacccttaaaatctgaaaacagccacagtgctgtggtttttgacgaatcaccccagctaaaagtcgcaagctcatgcttcttatttattcatctgttcttgccaaggaaatttgccagttcctcctggtgcaagtctcctgggaaaaatgagaggagaaataataagggcaccttgaagaaacaatgtaattatacataaagtactgtaggcaatgatgaaagtttagacgattttgccatctcatggaattaagaacaagggccctcctttccctgacagtagaaaaaagatatgaagacacattctggcacagatatgaatctttttaaatatttacttttaatcaccattttaatcctggcatttatatacagctacatggtaaaatgactgacttccctcatgaaggctgaacccattatttggctatgtcacccccatactctagtaagctgagtcaacccatcatcaacaagtcaccagatacaaattagtgacatgttgatgctattggctaatagttaacattgctgttgggcccaaatggatgaaacgtccttcttaacatctacaaataaataaccaattcatcaaatgtcactctctccacctggcacttagaggatacgttagtatagcaccgtaccgtttacaacattttagctttctagttaacacctttcaatatactcctgcttcataaattgtccctcaccctaacgcattgttcattttgatgaacagatattgtaatagacatctgttgtttttatctgtccaacatcctcgcacctttctctggaaaagagcccccatattttcctctgtataataaaaacttctcctttcttagtccacgtggtttagcttagtctaacatcccatgtcagctccagaaggcacaacacacaggcctggccaggtagctgatttcaatacttgaacccaattgggaaagaattggtcacatgctacaagccaaattaatgaactgctattccaaaattttataaacattacaggggaaaagaaactttcctttggggttaagccatcaaagagggtaatggactgtacaagtgaagatggtgaaagctctgcatccagccatacctgaatctgtagccacctctggacccttgaaagatgtgaaaccagaaattttcttcattgctaaagccagttagagttgtagttctatcccttataaccaaaagaaagaattctgattaatgcaagcaggaaactacaatctggaatgtgtccaaaaatctaaggataacataactaaattctgttacctatactcagggcttcatatgtttgtattatagttgagtctgagctgatccaattttgaaaaagataagccttccttctgttgtcatcaccttgaacattgccatttgtgtcagattcagcccccagcaatgcttacctagccattcttaagaaaatatccaaaagcacgcccactctaatcctccagtactctagggggagggtggttcatttttccacgcacaaatgagattattaaaagtttttttctcaacattttagaacaagactccccacgtgtattacagatattaatcttaaaaaatcaaccctttaaaatggttcctgagccaattgtttaaattatactaacttgtgaaaatacactttttaataaaaatatctgtagatggcggacctttcttggtatgtagtttagattactgttcagcaaatattctcttccttcaccctccctataaacagtgttgtgcttggccatgtgatttgctttggccaatacattagtaaacatgatgcaataaaagccttattgtttttgcatggcttggcttggattttaagctccagtattaagccatgataagagcacgtcttgggtaggtagctgctaccactttagcctgggctacagaaaaaaatatgtgtggaacagacaaaaaccaaactcagcctggaacctaagctgagccaacctgtagcatgaagtaaaactactcagccaatcccattctagatcagccaaaccacagaaaactgtaatgtgagaataaaatacttattgtaagctattacagttaagatgattttttccacagcactacaggggcactatgtgactgctatactttgtataaatgcacttccatgtttcatgtgctattgtataactcatgcagccagtattccttaagagataggagatgcacaagagaagtgggtccttgatctaaaatattatcattgaatgtcagcccttaatttgatctcagacacagtctaagcaaataatccccatcccaatttacgttgagaccaagagggtaaaatggcttccttcaggtcacatgactaaaatgacctagagccgacgtcaaacaaaagaatctttacttccagcctcacgatcttcccataatgccactctaacctttcttgggcatttatagataaattcctactttactttaacatctcactgtccttgcattgataatgctgtttcctctaaggactagcttatagcaaaatacagaacataaaaactaatgatattggacgtttgcaaaggttttcactaccagagaagggaggtaatgccaatttgtctattccttgtcctcagaggtaggcaaagagtagctttggccaagactgcttccatttcttgcaagtctgtattctgaaagtctgagtttattttttcatctatgctaataattatttagagaatatacttctattttcatctttttgaatgtgttctattaaatacattatttttagaagaaaaaagaactattggatactaggtttaatactttggtgatgaaataatctgtacagcaaacctccatgacactagtttacctatacaacaaactttcacatgtaccccgaacctgaaataaaagttaaaataaaataataacaataactgaaaaaaatcgctatagcaaaatgagctgagaccctgtagatcgtttaaaccagaagtcataaactcagatgactttagggtgaaaaaaaaatctctatagcaaaatgaactgagacactgtagattgtttaaaccagaagtcataaactcagatgactttagggtgaaaaaaaaatctctatagcaaaatgaactgagacactgtagattgtttaaaccagaagtcataaactcagatgactttagggtgagaaaagtaaaacacatgagtcaggaggcgggatgaggattcttgtgaactgagcatatcaggccttgttacatggggtggggagaacaacagctactaactagctaattgtgaccaagttgccaaatctttggttattccaaaagaagtcacatctctgaatttttatgggaaataataatttttaaaggattgtgactatttttattgacaccacatttcctataaaacatacctgtgaactggatgtcactggtatgtaacttctggcataaattaatgtacagggaataacactgcaataaacatggatgttcagatgtctcctcaacatactagtttcattttctttgaaaacatataaccaataattggatttgtggatcacagggacattttatttttaatattttggggaacgtccacattgttttccataatagctgtactaatttacattcccaccaacaatgtatatgagtattcgtttctctacatccttgctagcaattgttattttttgtctttttgacatttaccattctcactgggataaggtggtattttgtcatggttttaatttgcatttctctgatgttcatgttgttgagcagtttttcatacatctgttggccatatatatgtcttcttttgagaaatgtctgttcagtccttttgtccatttttaaattagtttatttgattttttgctattgagttgagttccttatatattcagaatattaaccctttgtcagacacatagtttgaaaatattttctcccattctgtaggttgtttcttcactctattgtttcttttgctgggcagaagctttttagttcaatgtaatttttttgtctgtttttgcttttgttgcctgtgcttctgagtttttatttaaaaacttcttgtctagcccaatttcaagatgcattccacctatattttcttctagtagtttcaggtcttacaattacatctttaatacatgtagagttgatttttttagatgctgagagattggagactagtttcattcttctgtatgtggatatccagttttcccagcatcgtttattgaagaaactatcgtttccccaacgtgtgttcttggcaccttcataaaaaatgatttggctataaatgcatgaatttatttctgggttctgtattctgttccattggtctatgtgtatgttttatgtccatcaacaggttagtggacagacaaacggttagtgctatcggtcatgcgatgaatactaaccaacaataaaaaggaataaaatattgttacacattacaccatggaaaatttcaaaataactgtgctgagtgacagaatctagaccaaaaacaagtacacattatgttattccctttatataacattcaggaaatatgcaacctcatctatagtggtataaagcaaagcagtggcagactgaggatgggtggtgtgaaggggtgggagaagtgtgggagggagccataggaaaatggcatgagcaatcttttggagaaaatggatatattcattatccgactgcagggattatttcacaggtgcatacatatatcaaaactagttaaattgcaaaactagtcaaacttcacagtttactatatgttaactataccttaacaaagctgttttgaaaaattaaaaagaaattaatgcatagtgaatgtgttattagaactttaaaataatctaactaggtcctatattaattataacatctggattgtaggattttaaaagagaaaataaatctacaaactaggattgagtgactaattctagaaatatctgtttgtaagggtgtactttttggttcactccagtatcataagacaataaagtaaatatcatatagtgaaattccctaaaaatagacaatgccacgttttgccaaaacatctatgaaagtatagaatattttcaaaagagtggaaaatatctgagagcacagccataaatttataactgttcctctagcatgttaagtaacattatacatcaatttatctactcggggtaggtcgttcaaactgatactaaatagtgtataattatccaaagcattcagatcaaagtaagtagtttcctagaatcttatgtttcattataatgggcagagtttaccttataaaattagtgtacacgtttgaatgtattaaattttattttacacataaaatttttatcttttaaaattcctgtttatatttgctaacaaggcatatactttgttctctctgaattatttctgagttataagtagtttgagaaacacaaaaaaactccttgttgaagataatttccataattatttaaaaagtacattgagaaagatttactatggtttttaaaagatcatgaaaaaggaaagagaaataacacaaggtagagaattcatgaatagataatcactttccgcagacaataagcaatgttccaataaaccctgagaaataactaattacttttctaagtgagcaaacattattctgtagtcccgtagacctgaaaaggaatctaaagatagtgaatagcaatgtgttcctaattttcaaaagaagattaaaagggccgctcgtcctcattgtttagctgcttcaaatcctatcaaaataatagaacctaaattagcaaaagaagcaaattttcactgtcctggaaaataaggaagtgagaagtagcttttgtttgtgaagagatgattggtctgagtaaattggatgactttgatgaaattacaaaaggaatataacccaaagcactgtagattcaatactttgataataataaacacttgaagccatataaattctcttcactatattaatttaagatggcttaaataataaaaatcagctgagaattttcaactgaaggaaaaacagagataggttatttaaggaaaagatacaagttggtgaaagctataggaattggaggtaggaccaactgaatcacagtgatttagaagtgggtgcatactgagaaactaaaatttcccaagtatctgaatttttagttatagcaaatgtgagagtatatgtaaatactagaggaaaatgaggtgagttcttggaaaataagaatagtctggtggaaaaaaaaagacttgatcaatgctgagttcaaaattgggcaaagatctgtaaagtggtaacgatatttcagaaagcctgcatatgggctggaatggagggaacagacagggcagggtctttaggaataatccattgaaagggttgacagtcaatatggtttggctctgtgtccccacccaaatctcatcttgaattgtactcccataattcccacatgttgtaggagggaccaagtgggaggtaattgaatcatgagggcagtttccccatactgttctcgtgataatgaatacgtctcatgagatctgatggttattataagggggagttttcctgcacaagctctctttttttgcctgctgccatccatgtaagacctgacttgatgctccttgctttctgccatgattgtgaagcctacctaaccatgcggaactgtaagtccaataaacctctttctgttgtaaattgcccagtctcacgtatgtctttatcagcaatgtgaaaacaaactaatacaacagtacaatatgacagtagagaattgttcctacctgattaatgtaccattactgcatttaaaatgtttgcaatgaatgcagcaaaaatggcaaagcccaacctgatttttaacaaggctgtattttaaattgtgattttcagtggtatataccctatttctctccagattacacatcccacacaattgaagagaaatcaacagaaaaattagatctttctccagtagtccaaagaatattcaaaggtttgggggactctcctacggctgcttctggcttgctctgtacccccagtggtaggttttccttggcatgatgctctatgaatccaaagttctccttttagaagtacatctaaatgtgagtatcccaatcatgcctcaggtggttttggttttttaaaaaatcacccaaggtctcttgatttctagtattaagccataaaatgggagagttctagtcttgttttgcaggacaacatcttcaaagagactctgggggcctgtggcacatctgagccagaaccaaacacccgacgtcattgttacagatacaaaagtaaataaatgaaaagaagctccaggtattggtgatttttatatctcgtgctgtcaatctgtttgtgtcagttattattttttcaagtacacaaaactgataaatatgagaccatttgggggaggttacacaaaaataagtatgcctgttggccacaatatgttattaaatagtattgtggtcctcagcatttctcaaactattgatgatgcttcctacattacagcgtatgttttcacaactcttttgaaattatagactttggctctgaggtatctaatccaacagtctcttttcacagatagaaagatagagactttgagaggtgcaatatgttggcccacagccaagtggtatacatacctagtactagcagagcctgcaatagggtccctggcaacaggcttctaggtctatcctcaaaatgtgctgctgccattctctctactgtccaccttgactattgttattggaaaaaggagtttgagaaatagttgtctaaaagagcaatttgtgtgcacacatgggtgtgtattagcatttcaaataacaatgtatcaatagatatccaagggataaatacatttcctcttccacttgcttactacattgttgtgtattgaaaatttagtatttgaataaccaaaaaaattatctttccatttgctattctgtcctgacaatattatgatgagctgtattttatgtaaaccactaaagaggacttattttaattagtcattcaggttttatatcatttctggccaattttacacagttttagttatttaaaatgtagctatatgagattcaacatttaccagcatttcatatttggaaactatttaagaaatgaagtggccaggcgcagtggctcacgcctgtaatcccagcactttgggaggccaaggcgggtggatcacaaggtcaggagatagagaccatactgactaacacggtgaaacatgaaaaccttgtgttataatcaaacggatggactatgagggggtaagctgttaaacaatagagtaatagaaagggggaacaaaggcagaaatgagcctctgagcagtagtgagctgaggggcccagagttgatctgtttccctttattaatactttcaccgtgttaatacttttccagaaaccttgcctccaccatggccctaagtcctaacagatagcttaattttcttagaggaattcaaataacaataataaataatgtcacatagacttctaatgttttaataaaaaccttcagcaacgcccacatttttacgtgacaattttttaaagggctatgagggagccaactatgtcagcaaacagacatgctctgaagacagggtggtccatggcattcaaagtgtattcatttctaccgatggtgcttttcttgcataggttctgacttgtgtagatttggacttcaagctaaaataaaaagagaggaatatgtgtatacatgagaatgtgtgtgtaacgtgtcgatggtataaatagtctcttcctctctctctgaattgcatgcacttaagcccctaagaaaagatctcttacctcttatctaagtaaagcagaattttgagctttgaagctaaatgatacaatgagatcagtgtaaatactctttaacacaacaatatttgagtagctttgaaacagtcgtcctcatttcgttacatacagaacgttcgtgcttcctccctctcaggcaagaagcggagtccgtcgtcagcagttagcagagtccagtgcgagtgcacgtttcttaaccggataacttagttgcccctgccccccgtcgctgcgcccgaattcgcctccagtagaagacgttcagcgggcgacttggcccggcgcctgggatcggtggctatgcgttccccaactagcaccctcgctgtccttgtgcagtggaacgtccccaggtctgagaatgcacctcccgccgtgtccaccccggccgcgtctctcctgaaggcagatcttggaggtgcagccaggactcctagaggagcctcctccagtcaccatcgcgggtggggcgagccgggtctcctgctgggcttcccagccgcttcgctccggacctgcctggagcctacaaaaaacaagggctcgtccttgcactctcgccccccatggatcacccctagaaggtgctttccccaaccctcctggtgccaaggagagcaaacctccccggggatttgcccaaagtggtgggaggagggttaatatttgctttgttattcggataaggggaggcaagtatgccttgggtgtgtgtgtgtgtgtttgagagagagagaaagagagagagagagagagagaggtgtttttgcagcgggaaacaagcaggaagaggcacagaggccggcgcccctgctcccctcggggcctctgagagcggcacacaccgtaattcccttcccagagcctacagattcccacaaacaatgacatcactccgccgccgctggcctgattacagctggggggattttcctgggcgcgcggcgggccaggctgagatgggggagctctccggtgctgaaaggggcgggggcgcgggctcgctgcgctgcgctgcgctgcgctgcgcccccagaaggcggaggcggccgggccgggccgggccgggggtgggcgggggcgggcccggggcggcccagggcggggcccgccgcttcccccgccctcattggccgctggcggactcacgtcacccgagctggtgctctcccccagcccctagggaattggagctgaggaggagctgaaaatgcagatttagcatcaagcacagacctacactcgctctttctctccggtacacacagctccccacattcgcacccctgcccgcgcgccgggccgcctgactgcacggcttcccctccagccagatgctggagaacacacactgattcgctgctttccaagaccctgttcagtctctttctctatacaaagatttttttaaaaactatatataagaattctttatttgcaccctccctccgagtcccctgctccgccagcctgcgcgcctcctagcaccacttttcactcccaaagaaggatgaagggtggttgtgtctcccagtggaaggcggccgccgggttcctcttctgtgtcatggtttttgcatctgctgagcgaccggtcttcacgaatcattttcttgtggagttgcataaagggggagaggacaaagctcgccaagttgcagcagaacacggctttggagtccgaaaggtaagctctcccatgcatttcgcatgttgtttcaaaacggggggacgggggggcagccctgcgcaatctcattgcagatttgcaagttttctctctttctcatgcgatgcagatattctgccatgggctctttaacacgatattgcctccggtgatctttcaccggttatgtaattaaaatgtccttcatctgtactagtaaggtcatcaaaataatttactgctctttgacttgatggcgaaaataggataacacctttcacaggatgccatgctccggggatgctgtccgaggtaccaagttctcgaggctgcctggggatggagggatgaagccctgaacagctaagcctggcgttggctacttggccagggaagtctcccccacccccatcccccggagaaagaatagtttcctacagacgaggctggacgtttggacactgcaattcacctcggtgtttctcccaccccgcgccgggaggacttccctcccagggacttcggtccctgctcctctccgggaacaacggcttcctgactctagatttggaaagaaactggtctctaaaatcggggcggaacttctgcgccctcacccccgcccacgaccgcccacccctggagcgcacttctggttggctccctagttctcaactcccggctacaggagctggagaggtggattttgagggggattccctacggagaagtcgaggtgtcctctcctgatgcgtgggcggccagcctggctttcccactagagcgtggggatccccattccaagaagttgccagagttcgacagtttgagcagataggtgagcctcccagctttggacaccttggatctcctttggagactccagggtactcatcctgggaggacagagagaagggcgctgggtgggggctgtggctgacctgcgtgtctctcctgcaaaagatgtatcagggttctccagtgtccttaggggacctggcgcaggctggggtggagtgtgggtgcagagagaaggtggggcgaggggaacccaaaggacagagatgtggctaccagagggctgggtggaggtccctgagattttaggctccatctcgctcctgatcccaggaagagagaggagtgagatgagcggtgggtgcttttggttattggttttgccttgaagggccgcgcagaccgaagctcttattagtctcttctgtcctgacttcccaagcctcccgcctctctcccagccaccgccagggctcctccaggtgtgggggcctctccctcctcctaagggcgtaggcagtaccggaatttcgaccccagaagggtctggcgacgagtttgacagaggtctgggaagaggctctgggtccgccggtggcgcgcgggcgggtcttgcggaaaggaacttgttgctctggaaagcgtgggtggagcaggggaaagaaggcgccggcggagggagcaccccgctgtggttttggcccgtggcctgccggctgttttgagagacaccaacacaataaagaagccgaccttccttcttcactcccccccaccccaaacttggcaagacccaggacccaaacgccattataaaatataatagtgattattattagttatacggaagcttacgtgctggagtccttacatagatttttacttaatcttctcaacatctctgaggaggctactatcattattgagcctatggccccgttgaggaaattggttcagaaaagggtgcgagataaaaacaggcaagggcttcaatccagatctttcagaagtgaacccatgctctttactccttagtacccacccaagcaagctaggtgctttcaggggatgtggggcattgagataagttgaaaagggattttaattcttgagtgtgatcttgctgcagaaacctgtggctccctccccctcccccacaccttttcatgggtgcgggggagtgggagggagccataggtttctgaaaaccattgttctcagtggttttctcttctctttgctgccccctttgaaaatgtgcccttaggatcagagatcagataactaggcctctttgtccttcattctttcttggagaggagcacactgattttgcatcacaacctgaaacctgcagttcccatctgagagacctctctccttacttctccataacctctcaggtagtaccccacaaccaaatccagtgattttttttccccttttacacgtttaagtaacagggactgcctggtgcaacatctgcctagaataaacctccttttggatccatgtcttgtccattcttcaagacctaaattcaaacctttcctgatgctacagaccacagtgagctttccctcctccaaatttttatgcgactgataggcaaacactgcactacataagctaataaatgccatcacttttcctcattatttcaggtatataagtaaatatgggttcagttgttgtatttctacttaaaaggtaaatattcagggatgatacctcctatatttctcatttcctccctgtaaccagcacattactgttttgccagccttgaaggaaacttccttgtctgtatttattatcccaggtttcccagacaccgtcctatcttgctttcatcatactgttttgtacttttgccaacatttgttattgtgcatcttagaggcccttatgtccttctccttccttgctctgatgcttagcatgcttcccaactccctactgctccctgctccgaggctcagtgtcagacacaaaagattctcagtggttatttattcatccatatgaaaggtcagcaatggaggctagaagaacatgctttcttattaaattatctcattctaagctcacaaatctatgagagaaattactggcatcagctgtaattctcagatgaaaaccttaaggccttgagaagttaagtatctgcttatatctgagaagtaaaagaactcagacttaaaaccaaatttgcttaactgaaaaataattgcttttctacatcatgctgcctccaggaagccttccctgactgccaagaactcttcccttgagacacaattttagagctctgctattttcccttttctttttacttttattatatttatcatttattttctattaacacatgaacatgtcattagctaatgggtacgtgtatttatgtcttcaggtagactataaatcttccaagaggagaaatgacatactatatctttatatagtctccatatctagcatggtggcctgtatatgaatatttaattgtttgtcaattatttgattgattcttataagaccatgaacaaacatttgttttctctctaaaatgaaataaaagcacctataactttacctctgaaaaggttatggagattaaagctttctattttatcatgacctggccctggcccaaagacctatgtctatcagaaaagatacttaagtctaggagagtgaatgagtttacagtaatgacaaaagcattattccaaagagtgccttaaaattctcaaaatgctactaattttaattgatttgaaacagaaaacaaaaattatttattgaagcaacctgttgaagattaaccaaaaatcaagtgagagttagggtttaaaaagaacctgatattatcctaggggtttcattgtattatggtgtgttttatgttttatccacagaggacagatgctgaaatgattacacaagtaaaatcatgtgaccatttttataatgtgtgagaattttttaattttgaaaacaacctaataatcattatgctgccaggtagtaaaaaattaataaatttctggtcgcttcacttttattaaagtataatttaggaaagaacacagcttagggaattttcacaaactgagcacacatgtgtaaccagcacccaaatcaagaaataaaatattaccagtatccctaagtccttttctcactcacttgctttgttttcaggttttagctattataaatatagcttttgtggatattaaagtctacgtattttggcaaacacatatatggccttctacagggaatcctagaaatggaattgttgagtaaaaggatatgcatgcatacagctttataagaccatcagttttctattgctgtgtatcactaaaaaacttagtggcctaaaaccacacaagtttgttatttcacagttttcatgggtaaggagtctggcacattttagttgggtcctctgctcgagtcttcacaggctgaaatcaaggtataggctgctgggtcccatctagaggcatgaccaagaaacaaccctcttctgagcattttcacggctttaaaggaattgagtttcttgtggttttagacctgaagtctttattttcttgctggctgctgggccaggaccactctcatcccctggagacctctccatagccctctcacacctcacccttcaaatatctgccttcaggaagagcccactctccttgcaaggttaacctgattcgttcaagcccaccaggattgttttccttttggttcttctgatgaactcagagtcaactgatttaggactttaataacatttgataaatctcttcacctttgcgtaatctaatcacagaagtgaaatctatcatcttcacagtcccacctaggctgtccacactcaaaaggaagatgattacatagggcatgtacatcagggagcagaaatcttgggggccatctcagaattctgccggctacagacaaacagccacatggctttcctaagtagttataccaatttacattcccttcagcagtatgtgagagttccagctgctccacattctcaccaacactagatattttacatctgttttcttttagccattctggtggtatgtagtagtgtctcatcgtgactttaatttgaatttccctgattatcaactgaagttaaacacctcttcatatgcttattgatgatttggatatcctcttttaaacacatttgtttcagatgctttgtcctgaaaagtttttcttttgggttgtccatcttcactttttatttgtaggatttctttacctatgatggatagaaatttttggtcagatatatgtattttgaatatttgataccacccatttaatgatatcgtaatgtcacaacaatgttcaatccagattatatgcttttacttctactttgtcaggcagccaattgtaagtcaaaggaagaattatcttgcagtatttccacatcccctatcccaaagttctttagatcaaaattgacaatatttggaggaaaaaaataaaaacagcatatagatttgatcataagcattccctgaaagatttcaatctaagaagactttaagggacagttcttctggaactaaaagattttccacagtagctaagggaaaatagcaacctgtaaccttgcttccctagacatggctgccattcatgttgtgccttagatcgaatccaagctaatccctcaagacctgtctggttgacctagaccacagtgttctctatccatttggtgctttgatgatgtataatcgattcctttccctgataccagtcatagccatcagaacgctcactgtccccaatacacctcttgtggctgaagaaaatgaggaacaataatgttgaaaggtaaagatgacaggatttggaatcagatagcactggaaacttggctaggttactaaatctctcagaggctcattgtcttctgaaaatggttaataaaatatggtggctgtgaaaaataaataatgtagttagtgcatgtaaagttctgggcacagcactgagtgcataggataaaatagctattactgcagtagtaacaataagctggttgtgcactagtgacactcttttcctcaaaaaagtagctgtgggttatacttgtgagggagtgacaactgattgagtaaggaataggaacccagcccagcagcaatccacccatgggctagtcatgacccatgagatgacctggcccaaattcagtaaatttaattcattatagaccatggtaattatctcagccaattatactggattcctcaggaaatctgactggctagttgctctagagaggagaatgcagtacagttaccatgagaaagcccattcaggccatgggaaactcagacattttatctaagtttctaatagctttccaaccccagtttccagcaaaagacgcctgtaacaggctgaagagctaagcaccagattcattgctccttcttcatgggctgcagcaagaccacatttcccagcctgccttgtaaataagcgtgatcatgtgacaattctagcctgtgtaatgcaagcagaagtcatgtgtacttcttccatgcctgatgcataagaattctctatcgattgtttctctgtgttctgctctcctctggggcttgatgtaattgagaacagtacattttgacaccaaatgccaaagcagcatcacaagatgaaaggagcccaggtccctggtccgtgaattagaagaccttatatgagtgagaaataaactgctattacattaagacactgagatttgggagtactgcccaaactaatatgctgtcagtaaatatccctttgcttaagttgctagagtgaatctctaaacctcgaaggcaaaccgagccagatcacaacaaaaattgttccaaagttctgtgagagcacacatattttcacaatatactaccaaacaacttttcaaatatttgtgatttgtcttctccagcaacaaatagaacccattctacacactgttcttcctgctggcaaccaacgtgccctactcataataggtgtttaatatgtgctccttgactatgactacagttggaccacaaggtggtgatttgtccataatctcaggttgaaggtgctggaaaaactattttttaagaaactgttcctgtagaatccatttctctataggcagccattcagctaggaaatagaattaagtgacaaccagcaagtgggcaactggcatgcttctttgtttctctaaaattccccaacttcgatattatcagtagtagaacagatgagctctttgaacaaagaaagtaaagtctgcagttacaacctgatcaaaatccaaaagaagggaaagaggggaaatacacctttttttctcaattgaatgaatatctagaaatcaatttctatttcagaaggtcttattagctatagatcataacgtcatagcacatcagatagtgatgctatagttaggttcacaataattatatattccactcaaactaactgctcaaagaggtctggctttaagaataaaacatgaaatctgaagttcaatttttcattgagttcagatccaacgtttcaaaaagaaactctgtgctgaatttgtgaattattatttgagatacaaataatcacgggacagctcaaaaactgacatttctatttgactttccttattaaggtgtatttatttagctaaagtccacaagtgattaagaagtcaagaaattacatctgagtcaacacttcagtctgaaatgtatagttgtgtattaatggatggtttatatgcgagacacatatgaaaataatttaactgccttgacaattttttgtcactgaagctaatttgaccacaactttttggaaattgttgtgatgtgctgagattgtcgataaaaataattgaataaaacaagttcttacattgaaagtagaacaatgacacactcttaatttcctgacataaagtagacttcagactgttacagcgtattggcagtttctccattagaaaattgacaagaatggggagaaaactgtaggatcctggggttgctctttgtttacaactttaaatttgacattaacttccataaatatccaattgttctcctagtttttcctaaatagattcatttcatgctcattttgtatcaaaggcaaaagagtccaaagaaaagtgaacaatatacagaatcactattggaagcatcaagaacataaagataataacttaggtttaaaacatttgcaaagtgttgtaagtcattagagaaaaaagttttgacctggaatatttgggtttcactcttctaaagttttaagtagagggcaaagagatggtcagccttgctttctgtgtaaacacagtgtctggcaaaactaagtctacaggaaatatttgttgaatgaattacttgattgatgttggtattagatgtagtagacaattgaatatctttcctcttaagatttaaacaatgacacacacaaacaaaaaagtgaatccttccatttgtgagatggtaaacatctcaatgtcaagacagtatttttacacattgcaatattcatgaataccgtgagtggacataatcaaattaaatcacgagataagttaggaaccctgataatatgaaaaatgtaataactttgatatttttgtcagaatcactcatcattattttaaaaaataccaagtaataaaaaaatacaagaaggtcttttttaattatctcaaatctcattattcagaaataaccattaccagctttagataaactctattgcagatacttctgtatgaatatgtatagagagaagagagatatataaattgttttatagagctgagatctcatcatatgtgctattttaagttttaaatcattcagtttaattattataaaatttaacagaagagaaaatcaaaagaaaactatggaaattgttaaacttcagataaatatgctatacaaaggagatattatttcctaatatacctccctaaaattcataagaaattattgtgtctcatatttaggagtttgtagttacatattttatacatacatggtagataggttacatatatttaattacatgtttacttatttaattacataattcaacttttgtgagttatggactcagtgctttgtaaaatggggaaattagcatcctgacactttctctcagcttccctacttccacattccaatgtttgttaggtatatcattatttttgcattgtgttacatataaatattaaccttctactaataaccataatttatagtattgcttatattagttctttcttaaaattctaatgttaccacaagtccttttatcagaacttcaattacaaattcatttttattcatcttttgagtagctaggttttactgaaacatgaagaaattagcctaagcatgaaaaaggagctgtctcagtttcagattaaaggggaaaaaattggcaggggaagtcctgtttttaggtcacagaggagaatgtggtgataatatccacttaggaatcacaattatttcagaggattaagaggcaaggtcaatgttcagagggaaggaagaggtgttaggatgggggcttcaaggagatggaagttcagacactgctagtagacatgagagagggagtggacaaaggacagatcatgatttctgggcagtactgcagaggcaagtgggaaagaatggatttatggtggcaccagcagacatcttaagaatgtcttaagcaacattcagattagggttgagaggtgagagaaatggaatcttccaaataatagagtgtcaatgaaatagaagaataggtaaattggaaataacagtgagagagatgaaagggagagagctatggttggtgagtgggatattgaagctcaaggctccaaaaattgagcacttccagataatgatgaagttcatggaagtgaattatcaaagtaaaaaggagatgaaggtgatcaagacactaaaagtaacatgcacaaggatttgttcacatacacctcattcatgctatggcaagaaataggattgtcaaggaagactgttgagagaaaacaaagcgaagtcctaggacaaaatgttggagaactttggacatgaaaggagaaagaggaaccaggagaggagtcagaacttggacggttagagatatggaaaaagaatcaagagcacacaggcctgtgaaaggaaaggaggagagagttaagaaggaaagaaggaagcaacctcagccactggttttagagacaaagtcattgttgaaataggaggagtcaccctagcacagtggaagaggagacgagtgttaatttgggtccccagatgtaggccctggaataaggacttaaatgcaagtagtttacttaaagagtgattctacaaaatactggtagaggagtggggaattgagataaggaaaggaaggcaggaataaagggtacatcataaagcaagttgtcactgtgggtaactggaactcaatcccactggaaaactgggagctggtgtagaatatgtgcttcagagttatcctgcctgaggggtgaggaagttggggtatttatacacgcattgcattgacatattaattaatgattgagagttactccaggctgatgttaacactccagcattttgtcctggcatatgctcagacagagcagaatttggccatccagaaaaatacttgcaaacagatgcagaggctggcacccacaaaatggtaaggcctatccaagaggatctgagtgtgaaagtaaacatgtctgctacaggaaaaaagcccaatcatgaaggaaagcatcaagtgtgatgaagtggaggtaccaaatatagaccatcccttcaagaggtatagtggttaaaatagaaaaatagtgttacagtcacttgatgtggttttaaaggtatttatgaattaataatttcttagcacttgtcagaccactggagattgctatcccaccagaatattgtgacatacctagccaatcaagtctgcattactctaactggtttttccagtcatttacatttttacaaatgataattataattatgaaattacagcctttcagaacaggaagggatcctagaaagacattaatttaacccttcatttaataaatgaaggaaataaatgagggaaagggcatcgaacactatgtttgtatgcttaactattccaaaaagcatttgagccttgttgctcattggcggtggtttagacaatgcattattgatatcactgaaccagctttccagactggatgagatagacaactagattgggtgagactcctataagtgattagccacatacaccaacttggtctgaccatactaattcatttcaggtcctcctgatgtgcttttttggtttgtttttttaccattttacccgtagaatttttataaattctgattttccaaacaaagctattcatagactcaaggattccacaccaacaaccattgggtttacacttggtaaaagacagaataggaatttatacttccttgactactcccttagtgactaaacagtgctatatatttagtaagcactcaataaataccaaaataaatactgagaaaaaaatttaaaggcttagcatcatcattagattttcactgcacacccagccgatgtctcatgagatggtgcaatcaggaaaaccaagtatgctaggaagggttataggaacatcctatttagtgcctgtgttaagtggatttccttaattgcccttaatagcctaaaattttgtgacttaatcattaagaatccagtgacagaggagaataaggtgacccacaaatcctattcctctttgcctttagcttctcctctatttctgtgggaagaaaaaatatcacttttatcagggcaccaccaattctcttcagtgatgatggaagctcaaacccaagaaggtagttgacatccaagagtcaattctagtcagttccagctgactatgtttctaggaactgtcagccaagaatgggagaccaagagagaccttgaagaacctaaaatgtgggaagaaggatgggaaacaagccatttgtgatctcttgaagttcagtagcagcactttaggcagaggagaagggacagggatccttggagagttgtgtcttaaatgaggtttgtcattaacccaaatttggacccagcagccgaagccagaaacaaaccattctggccataaactagaaaatgaggagaggaccaaagaagagttatgggagtttcaagccaatggaccaagaaattagcaagagctacagtcataccacagggacgtatagaaggagaagattattaaggtcattcaacaaacatatactgagtaagttcagtaaacaaacataatgcaacacactaagacatggatttgggaacaagtaagcaactgggattcaatcttactggcctaagatgattccaatagatagatgaaaaatcaaaccccaaggtgaaaacactttttttttttttttttttttttttttttgtgagatgaagtctcactctgttgccaggctggagtgcaatggcgcgatctcagctcactgcaacctccgcctcccgggttcaagtgattctcctgcctcagcctcccaagtagctgggagtacaggcgcacaccaccatacccagctaaattttgtatttttagtagagacggggttttaccatgttggccaggatggtctcgatctcctgacctcgtgatccacctgccttggtctctcaaagtgctgggattacaggcataagccactgcacctggcccatgaaaacactttttaagtctctgcttgtgttgcatttactaagtttcattggccaaagcaagtcacatggccaagtttagagtcagtgtgggaggagactaaccaagggaatggatacagggagatatgaacaaaacatggatccaatttcctactacaggcccctctgacagttacaacttatctgtgttgtcccatcaaagggtgaggaggctgggatgtttaacctccagctaccatttcttcttggttgatggttgctcctggggaacttcaaatctctcatacttctgcctgctgtaagtagaccaagcatgcttccactgccagagaacaccctcaggagagcggtgcctgaaagacattggcatctgtatgtactctgtacaggtgacctccagggtggaccaagggaaggcaggcagtgcatcaatatcatgtgctacacagaggacctaaagttacataaaattgaggttcgtcagaggctagaaagaaacagtttgtgagtgaggctgtatgtcagatcccctctacgtgtctcattacctaggtgtcactctagacttgatataaatcagtggttcagtctttagggggtacatcatagtttgaatcccattgtggactgttagcccagccctaaaatagttggtgtttgtggctaatccctcataggagtgtcacacaatctagttgtctgtctcattcagtctggaaagctggttcaattgtatcaacaatgcattgtctaaaccacagccagtaagcaacaaggctcaaatgctttttgcaatagttgttaggcacataaacatagtgtttgatctgctttccctcacgtataaaatgaagggttaaacgaatgtctttctaggatcagttcgcgctgattacagacaaatgggagtgctccatgtaaacaagtccagaaagtttttgtgatagatttaatatatagtgcatgtgaggccgtgactgtcagcagaaggaaagtcttcacaaagcaggcaataatacattgaggtaaatttacaatgaggcttataatttcaagaggtttaaaggaagaggtttataaagaaaaccacaggatgtgcaatgaaatgggcacggtttttcggaggattgcaagtagttttgtctgtctagatgacaagagactgggagatgaggccaaagaagtgacctggggtcagttcatgaccagtcacccatactatgctgaggaatttggattttgcaggtaggtggaaggaggcatcgaagggtacttgggaagtgtggcaggatggccacatacaggacatcctaggataagaagttgagctaatagtgacttggagaagccttgatctctgcctggtttctttgtcctgtggaatcactaattctggcaacaagtagcacatcatttaatagatgatgccactaggaagtcaggttatatgtctttgattccattgtcactggatgatggcatcagtgatactaatggcttgattaattattgtccttgtagtcacactgaacggctggtagagcagccagttctatccatgaagattagtccagctaagaacaaaacaattaaatgcacctcccctgacatataaatatatgaatgcagaacaaatcccgtaacttagaagccaagaagaaaagaaagaacagtggtgtatcaccatgatcctagctcacctaataggcacattactccctgatattccaaagaaataatgctcatttttaattttttctttctggaatgatatatggaaatgttgcctgaggctagaaagaaagtttgtgagtgaggctgtatgtcagataaccactacctgtctcattatctgggtgtcattctagacttgatataaaacagttgttcagttcttagggggtacatcatagtttgaatcccactatggacagtgagctcagccctagaataatggataaccatggacaacacaagctgcttcatactgttttcctgcttatggggaagagtggatcctggaattacagaagagaattgagcattatccgtggagaacaaatgcttaggaatggcataggagtaggcagggctggcttacagccaagtgtactgagtgctaagtcagtgacttacccctctctcccctagtttcccttccacacagcctcttacaaatcagctaattacagaagaacattcatacatgagttcttattttattaacaagtgtgtgttgagccctatgaagatgaggcacattgaaaggggttgattctacagacagaaagataacaggttcaagtttatgcccaaggacaagcacacttatagttctatagttctatagtctagtttataagaattcatacaatctgaggtctctattttgctattgcaaatgtctactttatgtgttggggtgtgacaaactgttttagcaattggtctctcgttctaaatgcaaaggaccttctcagaccatgctaacctggtgacacatcctaataagttgaggctgaatgagatcttttgtcacatctggttactcaaagacatgatgtcctcactccacaggccttgtgctattgagagaggagctgaagtcacacataaataatttaggctcctccactgcatgaaaagcatctgtttaaggagctgtcaagctgtccacctctctagtgaaatcatatttactttattcatctaaataatgtggcttgtttgccttctgtgtgaaattgtcttgcactgtttctcattggtgggttttatgggacagcatatgattttctgtgcatccatatgccactctacctctgggaatggaatggcttcttgttcagtagttttgattattatagccctttatagcttatgagtcattgggtttactcaaaatgtccagctcctcattctcatttttttctctatggcccagccatgcccgtcctgaaaaatttttaaaaaggaataataaaaataaataaataaaagtcatgtactctatatttcatttccaatgagttgcttcttgtttgggtaattttttattgtattagagacaaggccttactctgtcacccaggctggagtacagtggtatgatcatagttcacagcagcctccaactcctgggctctagtgatcctctcacctcagcctcccaagtagctaagactacaggcacacaccacctaatctgactaggtttttattttttctaaagacaaggcctggcaatgttgcccaggctggtctcaaactcctgggctcaaatgatcctcctgtctcagcctcccaaagtgctggaattacaggccaccatacctggccttgtttggataattatagcaataggagtccaccgaagtaagttgtgtttttttagttatttggcattctcacacttggatgctcagaaacatgtgagcaaatagcactgaatgtacccacaattatgtcttgtgctcagtttgtaagtcactattacgtaggtgagaccagagcagttactgtgaagtggaggtagctgcatttaagactgtgaacagcgcatcaagaagcacacaccacaacgtgtgtaatgcccctgccatgatacatcacttcaatctaatgatgagaaagcagatgatcccaattgagagacagtctgcaaaataactggcctgtactcttcaaaagtattaacgtcataaaagaaagacagatagactaagaaactcttccaaattaaaaaaagaaatgacaaccacatgcaacatgtgatcttggattgaactttgggccagattttttatttttttttccataaaggatgctattaagacagttggcaacatatcagtgatgtctgtaaattagaaaatgatatcacattagagttaactttctgatgttgatacttatactgccttgttcttagaaaacacacacacaccatctacaacttattctcaaatgattcaccaaagtaatacgtatatgtaggaaaataattttttaaatgcagtaaaatgttaacaattggggactctgggtgacatggctatatgagttattttcactattcttgcaacttttccataagtctgaaattatttcaaaagtaaaaaaattactgctaaaagaaaaaatgtgtacattgatgcaaaactaacattgaggtctctccctctatgaaatagagctgggttaaactttgtcaccaacaatgggtttctgtcccagctctgccactatagagcagtgtgaccacatccacataattcaactttttgaacctcatttttctcatctatgtaatccagatgtcaactagaaatacctggacccttgagatgtagataagatccactcaaatccccataatgtaccctgtagaagtcttaacccttcccaatattcctttaaattctaggagtggagctagattttcgttttacttctggatacagttttctacttctaccaaaactttccagttaataaattatgtctccttcctacccaaacaatcattcttcacaatggttactcaagtgtaaaattcagccaactcccttgatttcccttcaccaaaaaactcttaccattcacccaaggcatctgtgactagaatgtattttcctgaagatgtcacaggtgccaggaggggatttatgttgcaaacacaaagaactttaagtaagcacttgctttgaggagtcatttcatcccctcatcactgggcacgggcggtggcctcttcctgcccagcctcacatttcttgccagatcctcgccaccttcttttatctgccccttggtttctttagtatctcctcctctcatgggtgtgggcagattcttcccaggcagagcaggtcagatctccttgctctctaggcacccatgacctcaggtacccaccaaccatcacagaattatcccaaatagagacagtttcctcccgaagaagagctcagatgattacattctcaccctcagagtctctgcaaagtgagacatagtgctagatacacgtggaggtcatctccagtggaaatatgctgagattctatgaagtgcacctgctttaaaaaaatggaaattactttttcaagcagacagatatcaaacacaagttcctttcctctagccttgttatctgtgtggaatttaatagggtaccaataaggtttcactaacaaattacactttatacgaccttgccaaatgcagcattcttgtgggttattctagctttttaaagggatatcttgcttgtgaagatactagcatgtaattttctagcttagacatctacttttcacccccttttctcctttatttagaaataactctgaacccaaagctgatgtttgggagtagttaacttcttctcttgttttctatagctgctccaaagagcttggacctgactacagaccaaagtaacagagaatgctagcctcatctgtaattgataggatttttttttttgctagaatatctgagagtatttttacctcgtgttcaatctcatgagtttcttttcattccatatctcttatgatgtgccttctgtcttgtgcttagcagagtcctagacagctcagagctaacaagtgcaatgtgcatcactcattggatcacaaattgagtttggccagcacaatgctttcaatctgtttgacttgtggaggagcacgtaccctccagtttaccacaatcctcaccactttctattgtcttttacctgattcgcttagttagacagcctgcttgacccccaatatattaaatgtcttaccaatgcccaaagaactccataaccttagtcatccacactgaatagcacaactacttaataactcttgctagaatctagaacctcctgatctttttaatttactcagcaggtatctatgacatgatactctgcacctaggacatgagcaaaaccggtgttgtccccatagagcttgcaatccaggcattccgaggactgtgttctgagagataattctttccagcataccaagataattttgaaagatgaatatttaggcaacatgtcagtacctcaattttctttttcatttaagattcttctgctccctactactgtattcgaaaccagcctagtggatggctcttcctataagcaagaactatttccttactataaagtgtgtacaatccacttggctgtgggttggagcggctctattagaattgactggggatattcagttggaggttgacaatgagaacacgacaaggcagatgatcagagaaattacagtaattactcacaatcagtcttcgatagtaagtcacaaaattaaaaaggagaatgtaagtcacaaacgtaaaaaggagaatgtaaaagtatgaaccaagagaggttccatgttcctggtttaacagtggaatagtaaatgcaggatatcctccagaaaatgcctgaatgaatggtgcctctactctctgctatggaagttagttgggtccaacgcattccatgggggacgtggtccaaagtggacctgaagagtgtggtctgtcccctagtggtcctaggctgtcaatcagactatcccatccttgcctgggagagcagctgttgtttcactgatgataaataattctgcttgaaaaaaaaaaagtggtttctctttagtgatggaaatagatacttaatttgtgttttagattagacatagtcactcttatgttgttgataattaagaaataaaatcactctggaagttgttcttctctctccctttgctctgaagttgaaactcaggcctgtctattaggtacctttagaattatcactgagatcattttaccttgcacacaatccagggaaaccagtaatcatctctgggcagatatcagtaatgtgcaaaacccatttcctacttgacttggaaggagaaagaaatgttaggaagagtgaaaaatgaatggggaaaaagaacacatcagttcttctccacatggtctctcatcctccagcagcctaccccagacctaaattcaaatgagcttccctttctctcccatccctactcctgggcatcatgttctgcctataagagattgcatgcaattgaaggaaataaagaacggtctctgagaaagtcaataaaatgcagagcttatccctgttggtaaaattcaggtccccaaatgaaatggacaagcaattatcaactgagccagttttcaatccttggtgattgtttcgtctgccagtttttgtttcttaaacctcttgacagcagtccctcttacaaataaaattataaaaatcctatatagcaaatgatgtccagtgttctaccaaactagatcccgactaagcctgactgaggaccatgaaaaccagcacagtggacaaacacaaagaaagcagccaaaggaaaagtgaagagtctgatccgggaagccttaactgttctgagggttctgaatccatttgagaatctgtaataagcagtagactctcctgagaacaagcgaatgcacagatgcacaaaatttggaatggaggccatgccaaggtcacagaccctctggagcatctacagattccctaagggaagagaactctagtgtttaaaagaagcaggaaataggctccatgagaatttaacacttctttttatctgttcacaattggttgccagttccctggagttccctactgctgggaaaatggagtgtgtgggttcagagaggtgctatagcttggagccatagttttcaatgggaaaaggaagtaagaggaaaagaaagaagacaatgagaagtgttgctgagatccatacatttttgtggcataatgagaatttctaaaaactctgcaagtctgacttagcagcattattatactgtcacccagcctgaatcttcaagctgacaatttgctgcgagttcttcattcacttctttttctccttccttctggaaccatgcatattttgccttaagagaacaaagtgatgatataaaaaagggtgtgtgtgtgtgtgtgtgtgtgtgtgtgtgtgtgtgtgtttcaatgaagaaaacatttcaaaacatactaaatgcccgcagtatgagaggcttcttactaggatactcaggtgaatgtttgggaatctaccactgtgttcaatatgtctttgctatttgcaagatttgcagtctacttaagaatctcaggaatgcatcgatcagccttacatccttgaggtctgtgtaggcagcaagtaccttatactactgtaagtcacatagcatctgtctttctctccctgcggtggagcttatgattgcacaaagctcttaagcagctgcttctcagatgctcagaagacagtggatcttgggtctgcactccaaaagcaagagacaaaaaaggcccagaaaaataaccaatgcctacaggttagtcttttgttaggttcatgatcagtcaatttacctgtttattgcataagagtaagctcgtcagaggttcaaattttagctttatgagaccaattagctccattttctttcatagccaagaaagaatcccaaagaatccagactcaagggtcccaagatcacagcagtggggatgtcacccatcaacctggctgtccttgagtcccactcatctccatcaggaattccaggccaaaatctcatggattcctagtcatggttacaaaggggctgggacgtagagtaggaccaccacacaagcagtgtggatttacactcaggagagctgggatttctgcagagagctcccattcatctggtcaggccctggcaccccctgagccacagtgtcttctctaaaaaaatgaggcagctagaccaagccaggtatgcaactcagtagcctaaggtaacacaaccgtggaaagggagcttagtgtgtgaccataggaagtgcaggggtaggtgggttctgatttgaaactaggaaatacatgacctttctgaggtcattcaaatttaaattttaaaatatttttacatttttaacttgcatcttggaaataatttagactttaaaaatgttgcattaagtcgggcgcggtggctcacgcctgtaatcccagcactttgggaggctgaggcgggcggatcatgaggtcaggagatcgagaccatcctggctaacatggtgaaaccccgtctgtactaaaaatacaaaaaaattagccaggggtggtggtgggcgcctgtagtcccagctactcgggaggctgaggcaggagaatggcgttaacctgggaggtggagtttgcagtgagccgagatcgcgccactgcactccagactgggagagagcgagactctgtctcaaaaaaaaaaaaaaaaaaagttgcataaatagcacacaggtacacctatgttcatggcagcattattcgcaatagccaaaaggtggaagcaaatcaagtgtccatcaacggatgaatggataaaccaaatgtggtatacagggtggaatatttaaccgtaaaaaggaaggaaattctgacacatgccacaacatgatgaaccttgaagacattgtgcttaagtaaaataaggcaggcaccaacagtcaaatactgtatgattccacttatataacctaattcgagaaatcaaattcataaagacagagtgtagaaaggtggattccagggctggggggggaatggagagttactgtgcagtaggtacagagtttcagtttgagatgattaaaaagttctggtaatggataatagtgatagttgcataatgtgagtgtacttaatatcactgaactattcacttaaaaatcattaaaattgaaaagttgatgttatatatatttatcacaataaaaacattacttttaaaaagaagcagagtttccatatacccttctttattcagcttccccaaaattaacgtcttaggtaaacatagcaaaattaccaaaggcaggaaataaacattgatataatactattagctacaggccttattcaaaatgttccagttgtcccactagtgtccttttttctgatccacgattcaatccaaaatatgattatatttaatagttatgtctccttagtttcctctaatttggaaaagttctgcagctcttttttgtcgtttatgaacatgatgactttaaagagtactggtcagttatgagtttgtctgatggttctacctgaataaatacacgttatgtatttttggtgagaaaatcacatgaacaatgtgcccttcttagtgcatcatagcatgactcatcactggtgaagttaacttagatcgcttgggtaaagtggtctctgccaggtttctccactataaagatacatttcccattgtttattattgtatctcacctattaattttagcatctattggagatgtttgccggccacaattactattattatgacattttctgaatgatgatattcaatgtccatcatttcttctacatttattaatggcaattccactgtaaggaagagttttccctgcacctcagtttacatttaatttcttattttaaaaaaacactaaaacaagccagaatcatggtaagatatgttcctctgatacccactggcacttaacaactccaaattttctttctagtgttaaaaattctaagttctaggccagatgcagtggctcacacctgtaatcccagcactttaggaggtcaaggcgggcagatcacttggggtcaggagttcaagctcagcctggccaaaacagcaaaacctgatctctactaaaaatacaaaaattagccaggtgtggaagtaggtgcctgtaatcccagctactcgggcggctgaggcaggagaattgcttgaatccaagaggcgaaggttgcagtgagccaagattgcaccactgcactccagcctgggcaaaaaagtgagactccaaaaaattaaaagtaaaaaaaaaattatcagatccataatgcttcctgcaataagaaacaaaaggtcaaatttcatactacctgatagtgttcaaagtagaaagtttttggaaagcaaaatacagcacacatacattttcttcctctcccctcactttttttattttattaaatcttaatattatccagagtatatcagcagggttaagtagagaaaacatttaagaaccattgagcctggaattatcacacgaaatatttatgttaaatttgccatggggaatatggcttttagtgaacaggaactaaatcacaaaagctacaatgttctaaaaaatttttattcacagaaaagacccctggttaagttggctatgccttgaagatcatccagtatctgctgatctgagtccaggcctgtccccctgtgccagggatgtcccttgagagcctttatctgagctgctccaagacggtgtcatcagttgacagacagaaccaatattattgtagagttttatgttaacacagctgtgaaagctgaagaaataaaacttttttttcagctagctacttgtttctgtagtccattgctgagtaacaaaccaacccaaaatttggtggtataaaacagcaattttattatactcatgaatgtgggaatttgtaatccaggcagggcacagtggaaatggcttgtctgtggtccacgatgtgtggaggctcagttgggaagactcaacagctagaggatgactggtatggctggagttggaatcatgtgaaagcttcttaatatgtgcatttaacaccataaatgggatgacttgaaagctgcgctcttccaggattgtcaggcaaagcactacacatgcttctcaatgttgcctgggcttcctcataacatggcagcctgagaggagttggacttcttaaattgtaggtcaggactttaagagcaagtgtgttccagggaacaaggcacaagtctaatggccccttatgacttagattcagaagtcacatggcatcacttccaccatactcgtaattaaagtgatcatgttccccagatgcaagggctggaatcatggacctcatttcttgatatggggagtgtttaaaaaaaagctgtggctttaaacagccacactcttcaaaattaaaacactagaaaaatataatttttaacagaagtggaaaagagtctcttaagctgactgccctcccctttctccaaaaagtctaagaaatattccccaagtatccctctgattgaaataacctctcctttgggtttccatagcagcttgtgaataactctgctacagcacattctattctaacaataaaaagagtaacttatgcttgagtgcaagatattattccaagcacttttcatgcattatctcacttaattcccataacaaaaacattttataagtaaaaaatctgaggcccacaagggttaactaacttgccaaaggtcatagcgctgttacgaggaagagcgagaatttaaaccaaggcaatctggcttcagaactcatgttcttaaaccactccaccacagagtactgttaatagattgctgtgtgcaaatcttccttccctgtgaattgtgagctatttgtaggctgagaccatatcatcattacctttgtctctccagcaccaaacacagtgcctggcttatgacaaggaacacaaaaatacacaatagaaaaatgcacaaaagagaagaaactaaaatgtcaataaacatatgaaaagatgctcaaactttcaaaacaattaaaaatattcaaataagatgaaacattttgcctataaattggctgcagttaaaatatcattaataaatgtcaatccagtgttacttagagaatgggaaaaaggatatttttattcttatttacttttcggtgaatcttggaatatacaaccttatagggaaacttttctgaagtatctatcaaaatgataagtgttcataatctacgacttagagattgaattcctaggatatatcctacaggaaaactctcatctatacaaacagtgataatcacaaagctgttcatcatagcatttttaatagcaaattgattaagatatagttcacatgccataaaatttatcctctaaaaatttgcaattcagtgatctttagtagagttgcaaagttgtgcaatcattaccagtatctaattttagaatatttttaccacccttaaaataaatcctggaccattaacaatcactcttcatttctgtcccctctcagccccaggcaaccactaatctaatttccagctctatagatttgtctattctggacatttcatataaagaagtgatacaatatatgaccttgctgtcaggcttctttaacttagcattaagttttcaaggttcttccgtgtttttaccatgtgtcattgcttaattcctttccatttagaaataatattccattgtacatatatatcattttgtttactgttttatcaattgatagcaatgtgggttgtttctagtttttgactatcatgaataatgttgctataaacatttgtatacaagaatttgtgtaaatgtatgttttcatttctcttatatgcacccgtacatggaattgctgggtcatatgacaagtctatatgtttaacattttaagtaactgccaaagagctttccaaataggctgtaccattttactatcccaccaacagtgtatgagggttcaaattcctccctatccaggtcaacacttgctggtttgggtgcagttgggcaggggttgattttacccattctagtgtgtgtaaagtgatatctcatggttttaacttgcattctctgatgtctaataatgttgaacatctttctgtatgtttataggccatttttacttcttctttgaagaaatgattcctctaatttgcacatttttaattggatttcttgaatttattgttgaattgtaaacatttttaaaacattcctgtgcgagatccttatcagagatatgattttcaaaatttttctccaatctgtgggttgtcttttcgtttccttcgctatttcttttgaagtacaaatattcttaattttaatgaagtacaatttatgttcttacacttttggtgttgtatctaagaaaacattgcctaacctaaagccatgaagatttatttatatgttctattctaagagttgtacaatattagctcttacatttgggactactaatcattttgagttaaattttgcatgtggtatgagataggaatccaaattcatttttttcatgtgaatatctaattgtccaagcacaaaactgtgcttgaacagactattcattctcattgaattgttctagcatccatgttgaaaatcaattgaccataagttgattatcataaattatttctggattcagttttattccattaaactactatatgtctctcctatgccagtaccatactactttgattactttagctttgaagaagtgttgaaattgaaaaatgtgagtcttccaactttgttcttctttattaagattattttggctattcttggtctcttgagtttacatttgaactttaggataagcaaaaatgacagctgagattttgaaagtaattgtatagaatttacagataagttagggagcattgccattttaaaaaatccgtgaacatgagatgcttttccatttatttagatctttaatttctttcagtgatgctttgtacttttcagtgtatacatcttgcacttcttttgttaaatttattccccagtattttacttatttgatattattttaaattgacttatattcttaactttatgcttggattgttcattgcttgtgtatagaaatataattgattttgcatgttaatcttatattctgcaaccttgctgactcttttgtcaattctaataatttttctggattcattataaatttctatgtacaagatatgtcttctgcaaatagagatagtttttcttctttctttccaatcttgatgcctttatttctttatcttgcctgatggcattagctaaaatctccagtacactcttgaatggaagtggcaagagcagataactttgtcttgttctggtcttaagaaaatcattcagcctttcaccattaactatggtgttagctgtgagtttttcatagatagatttatcagattgagaaagttccctttcattcctaatttttttttttttttgagacggagtctcgctctgttgtccaggctggagtgcaatggcgcaatctcggctcactgcaagctctgcctcccgggttcatgccattctcctgcctcagcctcctgagtagctgggactacaggagcctgccaccacgcccagctaattttttgcatttttagtagagacgaggtttcactatgttagccaggaaggtcttgatctcctgaccttgatatctgcccacctcagcctcccaaagtgctgggattacaggcgtgagccaccgcacccagccttcattcctaattttttaaaacgtatttattataaaagaatgttgtattttgtcacatgtttttctgcattgggatgttcatgtggtttttgttatttattctattgatatatttattatagtaattgattttcagatgttaaaacaactttgcattcctggggtaaatcctacttggttatgatgaaaatcctttttatatgtgactggattcagtttgctactattttgatgagcatttttttgccatatttgtaagggatcacaatctgtagttttcttttcttgtggtatttctgtcttttcttcatgtcagggtgacacaggcctcaatgaattagttgggaagtgattcttcctcttccattttttggaagagtttctgaaggactggaattatttatttaaacattagtagaactaatcaggattagtagaattcatcagtatttattttgcagaaagttttaaaattactaattcaatctctttactgctattgaggctctctgataaatttttaaattctgttatgtactttttagctccagaatttctgtttggttctttcttcttattatttttatctctttattgatattctttatttgatgattcaccattctaacactttcctttagttctttagatatggtttctttgaacatatgtctgggtatagtgatatctatatataatatcatgtgaatatttatagttatatagtttagtctttgtctagtaagtccaacatctgggcttcctcagagagtttttattattttttcctctatgtgtggagcatatgttcttatttctttttgtgtctcacaatttttcttgaaaatttgacattttaaatactgtaatatgacagtttggaaaccagagttacctctccccaggttgtttgttgttgtttctaggttttgttgtttttactattgctatttgttttcctgcacccccacccctgtttttttttctttttttttaattatactttaagttctgggatacatgtgcagaacatggaggtttcttacataggtatatacgtgccatggtggtttgctgcacccatcaacccatcatctacattaggtatttctcctaatgttattcctcccctagctctgcaaccccacaggccccagtgtgtgatgttcccctttctgtttccatgtgttctcattgttcaactcccacttatgagtaaaaacatgcagtgcttggctttttgttcctctgttagttgactgagaatgatggtttcctgcttcatccatgtccctgcaaaggacatgaactcatccttttttatggctgcatagcattccatggtgtatatatgccacattttctttatgcagtctatcattgatgggcatttgagttggttccaagtctttgctattgtggaacttaaataaatttacaagaaaaaaaacccatcaaggagtgggcaaaggatatgaacagacacttctcaaaggaagatacttacgtggccaacaaacatatgaaaaaaaatgcaccaccactggtcattagagaagtgaaaatcaaaaccaaaatgagataccgtctcacaccagtgagaacggtgatcattaaacagccaggaaacaacagatgctggagaggatgtggagaaataggaatgcttttacactgttggtggttagtgtaaattagttcaaccattgtggaagatggtgtggcaattcctcaaggatctagaaccagaaataccatttgacccagcaatcccattactgggtatatacccaaaggattataaatcattctactctaaagatacatgcacacatatgtttatttctatttgcttatttaatgtctttctggactaattctataaagtctgtaatttctataatgtgccattgaatctgcttggttaacttaatagttagccaatgacagggcagaggttttcttaaagaccttgaatcaataaggctttttgtttttaccctttgctaaggggctctgttgtgtatatcgggacatatcctcaattctcaagcaggcagttttaaactctgctatggccttcacctcctgtttttaaagagacatcaagtcaactaaaggtgagcacttagggccttcttagatatttcctggttgtgtgtacagctctgcccatgtgtatggccttctaagtgtccaggaatatattagagctttgtaaagccttcaatggacatcttattccctagattcttttacaaaggtttttgtccagccttttatttgccccagttcatattgctacttcaggaaattgcaaccttaaaaatttgccactgattatttttgacaaattccctggggagtaggacttttccaactgagcaaaccctgggacagatcaaataacaacaaatcctataaatggaacttttccagatagcttccaggcaattatttagggatggagctttttaaataactctaaacccagtctgcaccctctactatgtatttggctactggttttcacagctgctgtgattgtgaggttgttcatgttcaaagatgctgcagagctatgaagaagaggatggtcatagggcaatctaaaacagcacagagtttgccattatcactgagattcaacttttttattgaataaacacccttcgggttgctgcaaacctcttgtcaatttcctgtgttctgaataagttgatttggcaatttttttcagagttctatttgcttttctatagcagtagatttttgaaggttcttattctatcatacctgaagtttccccaccccaacacacagcattatctttgaatgtaaaaaaaaatggaagcatcttaatatgcatcaataatggaaaggctaaataagtcatggtatagcccatgtaatggaataatatgcagccattcaaaagaaggaagtagtctaggtgatgaagtaatatgtaccataaaccccatgacacgtgtttacctatgtaacaaaccttcacatgtacccccaaacccaaaataaaaatttgaaaaaaggaggtagtaagtgaaagtctgtgatagcatctgagtgacaagagaagaaccactttgcataatatgtagtgtgtgtgtgtgtgtgtgtgtgtgtgtgtgtgtgtttaagcaaggaagaagatctaaaactcactcatttgactattaaggaaataatcatttgctcttacaagtaggtaggcctagaggaaaaaaaacaaaaaggtaacctaactccaatactgccaaaaaagaaaacatgaagaatttttactttgttatctgtgtttttcggttttctaaatttactctacattttctttatattaaaaataaaataataataataaatattctttaagaaatatttgagccacactgaggttctatgtgatctaaaaatctcagattggccccatctatgttagaaaacttttctatcaaatcaaccacatctgcttcccttttcttccaaacactggatggcaacacacacaccaaaactttcaatagccaatactttgagtagtggaatgctttttgatttagggactcttttgagaatctgatgaaatcatgtgtcctatttccaaaaaaagtacatatttacattatttgtctataatttgtaagcattcaattaaattaattaatcaggttaagaactgcaaacagcatgtcttcatcaatgtgaagacgtggagaaaagggagagatctgggaacttcaagcccctatatttatacagaagagaaaaagatgcccagagaggaaaccacttgcccacaatcatactgatggtaacagacctgagccacatccaggcctccaaactcccaggtcaaggctcttcccaccaagttaccttgaatcatagaacaaatgattggcctgtttaggttctccaagactcttagaggccctgtgccaaagacaacctctcattactgtgacttctctgactggttctgacctgatttcaaggatccttgagataggaaggtagagggaaaccagacctgccatccaactggtatttactaaatttagatgttcacactgtgctcagcctgataaaaggcaccaagggttcacagaaaaagcccaagacacagacagacagttgaagatctgtcacagacagctatgaagacatgactacaaaacatcgcagcataattctgaagcaaccaggtggtacctggggtatgcacactagaccaaggaaggcaaggagaatctgatgcaggtgtgaatgtaaaggcaaggctccatggaaaaggaaagggaatcaaaggatgtgcagaaagttaaaaaatgggggaaagaatagaaggtatttggggagcaggaggagagtggacaccacatgaacaaaggcaaggagaagagaaggaggacattgatagggaaatagaggaccaggactgacaggaggtttgccagtggtttccttgcatacttccctaccccatggagcccctgcaagcagccccagctttggtgtccctgtccctgggccaaccccagaagctaactatgcctatgtctacttgactctccacagcttccctttgctgaaggtctgtaccacttttatcacaatggccttgcaaaggccaagagaagacgcagcctacaccacaagcagcagctggagagagaccccagggtgagttttccccagaaacctgcctcccaatctctgctgccatggctgagcccaccaagggggtgtggaggggctggcagggaattttgaagtaaaggcacttaatgtactatgatagggcaaatgaatgctttgcagagtcatatcagggactctctgctcctttgtctctgcataataaataatcacaggcccctttgtatggctggaggaagaggaaattgggataccacccttttactggctatcttctcctgagttattattgggtgaggacttcgggttgcctgggaacatgttttggcctgtgatggatgggaagacaacaagcagtttaatgagtcattttacggaaggtttctactggtgaatccacatgctcagaggaggttgccatgccccacgttgtgaacggaaagaatgagagagccagtcagtgagcagctcacagcaggcagtggacttctcagtatccatgcatgactgtggccatgagactatctcagcctttctttttatcctatattttctagcactgatctaatttgccttcatgtctcagctgtctacttgatgttcatcacccccatttttttaatcttcagtctttaccttgctcttggactccaggtcccattttctactccctgtgatggctcaaattcaactttcccccaatcaaacatatcatcttagcaacaaagtggcttctctcccagtgttcccacttcttgcctttcagaataggacctttagtaatcatattttccaccatcccccatacctacacactcatccaattgggtagattctgatttctgttacaagaatcactaggaaggaaagtatgtaataactcagacaagttgttctctgtacattgaaggcagcgtaacctctttctcaggactctcagggaccagctgatgaaaagcgtgtcagatgtttgagttaaggactttcacatgagattcttttgagctgatagaatctgaaaactcattcttgtggggcttttcatgtgaacatttccctgggtttaatttgggcttcaattaggaattcagataaaacagtctctcagcagattgccaaatgacaggccacaggcaattttttctttaacttctcaagagttcccaccttctctaaagaggaatttctgctctaggaagccactttaactttacttttgcagtaacaattaagctgcctgtgctgccagccaaggccaagtattcttaaaggatctgtcatagaagccggcaccaagacctaagggagaagctctctattctatgtgataataaccttggccttggctataccaattcattacctggggatacccttgggcagtcatatggacagggatcttgccctgaacccaaggtgggcaccagtagacaaagatcaccctggtgcaccgtgacatttgtcttccctacacttcaaccctatgccataaccttgccatttatggccagttgttttccttttagttatgtattttcttaaaagtcccattggctactcttcttccacgattaaaggcgttgctccaagattattcagaaacatataaactgggggcagaatgaaagagacatttaaaaggcttgggctgggaaagagaactgaggcacagtagaactcaaaagtccctgtttggtcagagagactatttagcaccactggcctgagcttttcccattctaacacatatgatctctgaaatgctgattcttgaagtatacagtgacacttttaaaatataaaatgggactaattgggtaataaaaagaagagatcagtcactggtgattctaatcatttgtctttctcttcaaaatattatctgttatcaccaaaaggggtgcctatttccccttcattatctattataaggatccaggtagccaattgcctctatctggtagttgtaaccatctgccttgcccatgaagaccaacagaaaatagcagaaaaactaaagaagaccaagtatcctatatcttttccctatcttgtcatcaaggttaaatgctggggatgttgtcaataataaactcattctaggaaaataaataaagcacaaaaatctcataatttttttcaaaacgaaaaaaaaaactgctaatgatgactgcctttttccaaaatattagattaaggtctgagtctttcctgcatgatgttctcgtggttgtctaattttggcatctgctgatagaaaaatagagtggcaactattctgaaccaaaaatcattgactatgaacagtgcaaagatagtaaactaaagattctgccttgtgggtttatagctgttaaacaaaagggtaaataagtctagagtaggaataccccaatttgggggttctcaaacacattcaaacaggttgcaaaaagaaaagtaaatgaaagaaaaagggagagaccaagtagccagaaggaggtccaggcttttatgtcttacatagatgtggcaagttatgctttataaacacagaatttaagagtaagttgttttagcattccctgaaatgtactgtctcctagaactgctaacgttaactacggttgcagccccagcccccagcttccttctccttcctgtccctgcaccacttcccagcctgtctcactcactgtctacaggcttgtggtaaggaacacaaagcccagggagggtggtctgagctgctattcgctttcagggcttcatctactgaggtagctttttgaccaaagaaacctccaagctctgctagcaacccaagaaataaaaaagaaaaaggtagaaacccaaggtactttttggctttttttgacttcagaccagaaatttcaatgatgtttgcctctcatgtaacaactaatttttatgctaaaaggaaaacagaaaaaaaaggactagaaagagctaaagtgctactttccatgtgctcatctttgttcatcaatatgcagacaatagctaagaaaacagattctgatgtagactgtgttaaagatgttcgcttctctttccagttcttcctgctaaaagattagctgactgccaagtatcatcatttagatgctaaaaagcaaaagttgtgtcttgtttatttcagtaatatctttgcacagtgagatgttcaggaaatgactgagcatgtcaaatgaatgaatgattactattttttcttcagggttttaatccatgtaatagtattgcccttctcattttatattttcctccgtatcccaaaatttgtctccattaggaaataaaagtactatatagtcttctccctagcacctcttttacatacattcttaattgtgggtaacagaaaccaatgactgtttcattacttccaagttttatcacaaagaatcccatgaagaaccagttcttaatttccaaaacccaatctgccttcttcctaatcatattcacagtcgtggtacaggcaccaaagcgggacaatgtgtctggaaggttttgataatgaaaataatttgaagaggtaataaatcaattcaacactgaaatgaaataatgaaactaaaaataccttctcaacatcagggtcaaaaacaaatattttatgcccaaaagctctgtaagatttgttcaacattagctagaacaataccaacaaatcttaaagccaaacctatcttcagtccctggtcaacatatcaaaacctcataaattctacaagtacctgaaaagcttccgaagagtagatttatttaagataatatttgcttcccagctctgtcaaaccatacttgcacatctgaaatagaatattaaagtgaaatatattttaaaaacatgaaggactcataattctatgagtaacacacactagtcttatggaagcaaaataatttaattaaaaaataacctgaacttcatttcttgagagaggttatatttgagaattaaaaacatttatttcctttactaagcaattttactagaccatacaattattcctcatttttaaacatgtttcagttttacaagtcagaaacttctatcagtccaataaaaactttccttgcttctctcatctcaaagaatggatgatatttcctttgtgttctatatttagaagctatatctttctagcttctttcttatccaaatgtatccacatgtttaataaccataaaaggcagccacacgttctggtagtgatctgtttttggtctttaagggtctattcttgaatatatctgtggagttttcaagatactgccaataacccacaaaatttagcttcactggataatataatcacttcagaaatctcataataccactggagcaaaagaaaagtttcctattctttaaaatcaactggacatgatttatatgatttgtgtgtattgtggccaaactcttctttcctttcaattatagtagttaattatttgattatttattataaattaaaagggaagagaagggaaaatgctgttatcttttggaaagtctattttcttttctttctttctttcttttttttttcctgagatagagtctcactctgttgcccaggctggagtgcagtggcacgatctcagctcactgcaagctctgcctcccgggttcaagtgtttcttgtgcctcagcctcctgagtagctgggattataggtgcgtgacaccacacctggctaatttttgtatttttggtagagatacggtttcaccatgttggccgggctggtcttgaactcctgacatcgggtgatccacccgccttggcctcccaaaatgctggaaagtctactttcaaattgaaaatgtcacggagaaaaatctcctccccctcttttgtcttgaccacaccttcctccagtggataactaatggaatttgaggtgacctctacttaccatcaccatgactgcatgagagcctcacagtctgggggctgggtaaaaatagaaattagatagttttagtgcctttttaagggatttatacccaaagaataggctgttttttatccttatacttgttaactctaagaggataaggtctgaggttgtgaggtgctgctctgagaaacatatagaaattttccaatttatcttccaaatgttttattgaaggaaaaaaataaagcatatagatttgattatattttacttattaagaaacatagtcatggtaagtttattaatattatgagaaacacaaaagggaaaatagcattttgtatttttctagaactttttattctacagggcatttgtggctgctatttcttcatattctcatttccttgtagcataaattggacaaagggtggattctgagttccccaaattctcatggtttgtaaggagacttaaccactccatggtgctgctctacactgatttgtattccataattttccctgctcctctgcacaaagagaattatagagcaggaagagtcttaaggaaacattgattcagcccttgaccttgaagcattaaaatataattttaccattgaggcaaaatagacccagagagagagaaggtgacttccctggggccacacagctataactgataggaagaaaataaaactcgtgactcctctcaatacgaagtctgatttaaataaaaaactaagtgagaattgatactgcttatgaatctgtcgttctttaaacaattgtttgcactaattagtcactgaattttctcaattaaaaataatgtgctgaaaagaagtgaagttgcctcctgagtttatgtcacttatgtgaattcagtgagctcagctataaatggaaaagtgaaaaagaagagggaaataaaaagggcggcacttgagctcactgttctgctcaatttgcttatgccctggagtggccttgaactgaaggcagctgagtatgcagttggcctcggttccctggtgaccctcacagtggaagcatttcacctttctgggggtgagcctgtagcatttaaagttaatacttttgatacaaaatatttcctaaacgcaagctgacttcttcatttgctgtgagaacaatgggacacgaccagggtccattgtgaaagggaaattccacccttgtgatgtattgagacacaatatcagtttctaacccttaaggagttttcaaagttaattttaaccatgcataagttccactttgcacactttagaattcactccctaaggcgtgattcttctaggagaaattaaacaaagatggggtcttcattttggatttcccagaaacagactctgagatgcagagttgtatgccagagacttcttggagagcaaggaagagaacactgggcaaagggagaagctgagcaaatgggctttcaacaggggcctcagtcaattttacaggaaactcagaaacaggggtggcccttcagagttaccccagtgtgaggcaaaggaaccggacctttgtgcccccataatgaccagttattggcatgggtactccctcaaaggaaacatagtcttaggtaaatcacgtcctgctaccaaaggcaattctcagtgaaagaaactctgagccacatttagcagctggaggaaatgtgtgagggccctaaagaggaaatctggagagtgcaccacagttttcattacacctgccatgcccacttcactcaatttgtctgtaaattcacatttgattcaagaggcattttctgggatctttgacctttctggaagagtggacatggcttcccagatcaggagctctccgtgcccaatccagctccccatccacccctgctgcccttttccagagattgaactgaactaagaggggaaaacatgaatctgtaggcacatgagctggaccatattttgaacacaaatagtgaagccaagagacccaagtgaaacagtttctgacctagcctcccatctgtggccaaattcattttctagataacatgccaagaggtcagcgggtgtaaaccattcatgagtgatgcaagttgagagttacttgacagcatcaggaaaaggagaaatgcaatgggggaggtatgcataagaagcagggcagaggtatcttcatggatgccccaacctgtgggaaaaattcatctgttctaatcctctgctttcagaatgtggcagggaggactttcagcatctcctctgggcattgcagatatgcctggcttcccaactcaaagagctgctgctggtgctataattaactatttgtggggaacaggggagaattatttactacagctacagaaaggcacagggaaagctgctaatgagtaagcctggtttttttctagatgctgtttttttctagatgttcatttttaaatgatgggtactgttcgtgctgtcatgcttcctaaaggaaaagtgggaactctctgggaggcatcatgctagcaaagccagagatctcttggaagttttaactttctttgggagaattcttacaagccctggtatagagaaaagttaacacagagaaaattggtggctctgtatcgtctttacaattcacaaggtgaagagtctctaatggtgggctagcaaacctttaggacttcctgggaaaatcttagatgtttgaagggcaaaattctcctgatctgcctcacctgattccctccccaaccttccccaagatgcaaaaggaaatgcatttatatatccaatgtgtatatatatatatatatatatatatatataatgcatttatatagcctctattatatcttctaaaaatgattatatgtgtatgcttattaaattcataatgtaactctcttatttagttgttggctagaaaaccagcattcattcagcaaatagttatcaagtccaaactatatacagggcactcttctgcatactgaaatataacagtgaacaagacaaagtcctcctcccagggggcttgtatactagtggcaatgaaggagagaaacaaaaaacagatgaccaagcaattgtatgaatggtggtcaaaatgctatgagaatgagtagagcagagtatgggaagagggagagccatagaggggtgtttctattttataaaaagcatccaggtttggctagtctgggaaagtggcatttaaatatagacctgaaggagatgaggaaggtattcatgtggatatctggagaaagggcactccagacagaggaaccaccaaggaaaaaggcctggaatccaagacacacctggtgtgttccaggaacagcaagaatgcgagtaaagctgcaaaggaatgagccaaggacagtggggaaggagatgaggttagagaggaaaaataaagcaagatcatgggcgacatgataagctggggaaagaactttgaattgactctgaatgagatgtggcttctgtgcctatgggcaaataatagacaatggggtagaggtatggatgagggacaactggactagagagatccatgcaaggcgattgcaatatttcagaagagaaaagccagtggcataggccaggatagaagtggtggaggcagtgagaaacaaatcagatctgggagtatgttgtgaaggtagtcttcaaattcgttgatgcatttgctgatggattagatgaggaatgggagaggaagtgagaaggcaaaggtgactcctaagttgttggcctgcattactatagaatgaaatggcacttatgcatatggacaagatggtgagaggagcaggttgatggggagtggttagggaattaagagtttagttttaagcacgttaacatttgagatttgtattaagtaaccaagtggagatgatgtgaaatgaacagatggacttaaggatctaggagagaggtcagagttggagatataaattgagaggcatccatctattgttagtgttcaatgccaggagactagttgagcttacctacgaaatgagtgtagatatagaagagaagatttgtgggactgagccctagggtactctaagatttagaagtcaaagagataactggggaccagcaaaggagacagaaaagcagcaagtaatctagaaacaggatcagaggtcaagagaagaccaactttagccattgtgttctagctcgtctacattttaccatagtaacttggccatccctataattatttcttattagaggtatcaatgtttcttcacttttcccctctctgatctatttttcaaacgctttctcaacggatattgaaatacatggttcacacatgaacttatgaaattaaaggatactgatgtgtttgggctgggtagtgtgctttaaagcagcaggaggtcacatttgactcagaatgttgagaatctagctcttaaacctgcaatcccaactaggcactaactcagagccaagaccgcgttctgcaagctgccaggtgaagttaccaggaaacagcctctgtttgacatgtcaagggaagaacctgaattgggcacctctttttaattttgagaaactataaaagccatgagaaagatcatgtttgactgtaaaccaaaaagaaaaaaccttaccctccaattaaggaaaataaaattataagttgttgttgatttaattctgatcatattttcatagatttcagaaagatatagtttttaaaagaatttcctgttaagattcaaaattttttctaggatataatttctcactcctcaaacctctgcttcaaaataaattttattcaatatttagcataaggagactataaagttccttaatggtgacataaatgaacagttataatcgtatgtctatctagctactgaatatttctaagataacgttttgtgaggcaaaagtggtttgaagttggtgatgcctcaaaaaaaattttttttaatactctttagaactctttctgggtattttaaaattggtttagctatttttcctttttgatgcctattgacatgtttgtgatcacatctctttctataaacaggtttcacggtcttaaagccaaaccaagggaattttgaaaatgagtggaattgaattcctgccatttccagtaatttcaaagctttatgggttcaggagaggataacagtgcagccaggtctagaaatgagtaaacagcagttaggcaaagagattcatgtctgaataacaacccaattgctggagtttatctaattggtttgccattatctgtaccaaaaacattgtgtttttcatcttctctacgatgagcatgtcccatttagcaataaagaacttattgcttgagagaaaacaggtaagacaaaatagttttccattccccctgaaaagggagagcagtccatcccaagtaaagaatagtttaatggatgttaatttttaaggacaacttagagaatcaacatgagaaagtttcttctcccaacagaagcaaagaaaagcaattaaaacctattgtgtggaaagagacccaaataattgtctattagggagaaaaggaacatgatagagtccaatttgaggtcattcttgagttccaatacttacactgacaccaattaactgtgctctccttgaacaaaccgttgtttcccccagtcttcagttctcttgtctgtaccatgaggagtgtggactagttagtctgtaaaatgccctctgaggtcctaaatctgagattccagggactaacctgaagcctctccaactggttaatatcaaagccacgactaaaacccagcaattctaaccagtttgtgatccttcctttacatgtctttcttttcatctgagaaatagggctttttctttaaaccaatgctataaagtgtttgcaagaactagcatttatatgttggtatcctcaacttatagaacacaatttcaaatcctgtactgttcaaaccaattcaatagtaccctaaaattccatttcttgtctcgggggaaatattagattatgagatagaggttattcatccacttcaaagataatagctcctctatcatgttttataaattgggatttggtttaagatttccctggtatcatgggtgtgaaggagtgggggtccttaaaataaaaaataatgtttgaaaacctttgatagctaaacaagttcgattctttagcctagtcaatcagtgtatccaacagggataacaagcttgatgcctacacaggccatgcaaataaattacaaattgaggtgggtcagttgtaagcaaaacagctactcaagcaagagaataaacggcaaaatgatcttctcctctgtgtgaggaacacaacagagagtggtggggactgtggtgaacctgagtgtacacaccctcttaaaaggaggaagcggattcttattctcagctaattgttacctccaataatggacgccctggttgccacatctacaattttgaagaaaagtagcaactaccaatctttgtaaagattcttttatctttttaaaaaaattagtgattaaattaaaatttcttaacacactgtccaatctaaagaaaatacatcatcagaacaaatttttccatgcactaccattttgcagtccctactctacaacaccccaggacaggatgaaacctgatagaacacctctatgactagtccgtgacttcattatttgccaaggtagtccacataaaagttcttccttaagggaattccaaagctacttccttgtagcgttggttcataatccacattctcctttctgaggccaaattaatctatcttccatgtgagaacccttcaaacatttgaaaatagttatcatgccccctggaccttcctagagtaagcattcttagttctttcagatgttttcattgaatttggcacttctttcccatgccttcctgattacacctctctgaacattactggagaacaatacattataacatccaggtctgctctgattatttcagagtagtattgcatgctcacttcccgtatctcccacattttaaaagctattcttctattagcacatcttaaaatcattttagcattttgtggaagtcatagatctcacattgattaatagtgaacctacaattagctaaaatttctaggttcttctaaaatacactcataatccatccttgaaggatcgaggtattggttctaaaacaaggaacctttaaaaaggatttattttttgaattttcatcttattagagttcattctgacctgtcaagattttattagatttggattcagtctcctttccactttcttgtcatctatgattttgatcagcatcaatatcttcaacagttcttaagaaaaaagttaaatagtacaaagaaaaatgacaaagttcagaaccctctgccaggatgatatgaatctattaatatagactctaaggagtatttcacactgaccccatattaaaaggaaattctaaagcacccaaagttctgaaaaatcattcaagttaaatgaaaaaacagtgtctcaccagggaggctatttgaagactgtttatatggcttaactccaacactctgaatctggttgatttgtgtgtgtatatggctctctgagaaatcagtttatttgccatggaacaatctaatttggtcattcacatgactaaaagtaccagaccaacatgttttcaatccagtcccttgaggcaatttgaattctgttgataacttgtccacacacctgctactgatggatgtttcgtcatgaaattttaatcagagagccaaaatcaatgggtaattgttaatttcaagggtgccaggtgacactcaagtgtagaccaaaccaaatttttataaaacttaataaagtgatttcctttaaatgagtaagtcaagatatctcagacatagattaattcagctaaggatcatattctccagagctgaaatattaactatcattgaacttctatcagtgcttccaaaataattattctaacacttattcatgtgacatgggcaagtcatttaaccttcactaattgtcttcattttatcatctctaccattaaataacaatgaaagtccaaatgactggaaataaattgccttaatttttaatccctatcatggaattacaatgaaagtgcaaatgtctgccaatacatgcctaagacttcaaagctggaagtatgactccatctaaagtacatgttaatttcacaaatacattataactttgccaaagcagaaaaggtgatagtgtcacctactccttttgcatcttcttagttctctacttgttttccttgcctgcccctactccatgaaaaatatgggtgtgaattaaatcagtgttccttaaactgtgttacgctggagtccttgggttttcttccagaacgttgtgaataataaagatattagttaggataaactagattacgctgcagtaacaaattaacttttaactcccaatggtttaatatacaaatgtttccttttcactgtgctacaagtcacaagtccagcatgagctggatagatttgattaatataatgctgttgaaagtttcaccatcttgaaacgccactatcctagcacatgaattccaggacactggaagagaaagaggaagtgaaagcataataagctctacccacttgtaaatgcctcagcttgaaaatgttacatatcactctgctcaccacccattagcgagaactaggcaaaatgaatgtcttaatgaaaagaagctaagaagtgtggttctcccatgtgctcaggaaggagagacaaactggatttggggagcagtagaagtcccttgcatagtgtattttttattcaaaacaacaataaacatgtgaataaaagcccatattctattattctgggtgatccttgggattgagactttcccataagttcagcactcatgtttataattgtattggcagcaatactgccatccagtctctggctattgagaaagggtgggatacaccccgggatgcttctgttgtcctaaaatgattggaacatctctcttcatgtgtgaccttctgcaatagggcctggctcctcctctatccataggtagagtctatttattcacccatgtgaaggctctgtaacattttatctggtagaacgtggtgggagtgatactgggccaattctgggcatagccagcccctacctgacctggtagcttctactccttcctcagagaagctaaagaattgtgattaccctgagaactccatgctgtgagtaggccaagccaggtggagagattgatataccgtggggagagagagaggccaaggagcaccaagataccagaactatgagtgaagaagccatctcagaagtggatcttttagccccagtcccaactgctgttacctggagacaaactacccagtcatgtctttcctgaattcctgacccaaaaaatcttgagccaaataaactggttgttttaagccattagtatgtggtgtaatttattatgcagcaatagataacaagaagacaaacgaattttcccagcagtgcagaggggatgagtggtggagaactgagtcatggcataaagcacattaaaatgaaccccaagacactacaccccagcagtctacagcatagtcacattgtgttttaatcagcattgcttctttggctattattgtttttgtggtgtttatatttaactcgtaaacttgtcttagttttatagttgtataggaaccataatcattaggagttgttattctatcttattttgtgcatattatttatacatatatatatatatatatatatatatataatgttgggcgactaatgaaaaatggttttcttataaaagagtccctttcttgtttaaatttattcgagtttaagaaatcaatgcatttgaaaagatctaaaagaagtaggcttttccaaagtataaactttggcatgaaacagaagcaatgcatcccttttggtgcagtgatatcagcaggtaacagcatacgtagtgagaggagaatcaaaggaagaattaggagttccgagttctaatcacagctcagccatttattgtctatgtgggctccaggtaaccacttagttttatggtcctcaatgtccccatctgtgaaatgattaatgacattacctgtgcttattacatggggttactctggcaatcaaatatgatagaaagaaaggttcgaaaactgtggacttttactattgttcatagagattcaggctagagtcttaagttttgtgctgacaaatctaaaagtaacctgactaaaaatgtgtagcaactgagtttaaaagaagctcaaataaaattatctttaaaaactcaatccaatgtaagattaaataggaaatacattggatttacattttctttgaagtataaggaaacgtgcagtctgctgggatccatcacactgcttggtctggaaaaagaggagggtgaattcagaactcttgtccctctctaaattcttgtaaccttctaatctctctggagtgtaaacttgtggccaagattttgagctctggataaattctagttttaatctcaggtccaccactcactcacttgccagttacataagtttacgttgttatttaacatctcacaaccacatctatacaatgtgggtaataataatattacttatctgaaaggttgatgtgagcattaaatgaaatgatgctagggtaaacgttcaaaagatgacagccatgaccaataatattttgttctctagcattcgattacatggtgactgatactgatctctgaaacttgcctatgtagtagcatttttgttcactgctgtcctttagtaattctacataccataaaaaaattagttatgcatggtggttttattttcatcttaccaaaatgatagtttacagttttaaaaatcaaatgcaagccttataattaaaaacagaagcattttgctccagctttctcaaatccctcagaggcattatccaccaattctttaagtgtttcttgtgctaattaactccacattttaaaataatatgtgtatgctgaaatgtgtggatttgcttcatttcagatgttgtctatgggctttcttctatggaagatgagatttaacttttaaattcaacacacacacacacacacacacacacacacacacataccatgtttatattttttctggcttttgaatatagatgtatcacaagatggggctaggttaatattcagtgttcatattattgtgagtccttaagtactatttacagctgagccatttataccaataacatcccttcctctctcaaacagctttttgtttccctgtagttaataatggccctgtgatgccctctctcaccactcctattcaacatagtgttggaagttctggccagggcaatcaggcaggagaaggaaataaagggcattcaatcaggaaaagaggaagtcaaattgtccctgtttgcagatgacatgattgtatacctagaaaaccccatcgtctcagcccaaaatctccttaagctgataagcaacttcagcaaagtctcaggatacaaaatcaatgtgcaaaaatcacaagcgttcttatacaccaacaacagacaaacagagagccaaatcatgagtgaactcccattcacaattgcttcaaacagaataaaatacctaggaatccaacttacaagggatgtgaaggacctcttcaaggagaactacaaaccactgctcaatgaaataaaagaggatacaaacaaatggaagaacattccatgctcatgggtaggaagaatcaatattgtgaaaatggccatactgcccaaggtaatttatagattcaatgccatccccatcaagctaccaatgactttcttcacagaactggaaaaaactactttaaagtttatatagaaccaaaaaagagcctgcattgccaagtcaatcctaagccaaaagaacaaagctggaggcatcacgctacctgacttcaaactatactacaaggctacagtaaccaaaacagcatggtactggtaccaaaacagatatatagaccaatggaacagaacagagccctcagaaataatgccgcatgtctacaactatctgatctttgacaaacctgacaaaaacaagcaatggggaaaggattcccgatttaataaatggtgctgggaaaactggctagccatatgtagaaacctgaaactggatcccctccttacaccttatacaaaaattaattcaagatggattaaagacttaaatgttagacctaaaaccataaaaaccctagaagaaaacctaggcaataccattcaggacataggcatgggcaaggacttcatgtctaaaacaccaaaagcaatggcaacaaaagccaaaattgacaaatgggatctaattaaactaaagagcttctgcacagcaaaagaaattaccatcagagtgaacaggcaacctacagaatgggagaaaatttttgcaacctactcatctgacaaagggctaatatccagaatctacaatgaactccaacaaatttacaagaaaaaaacaaacaaccccatcaaaaagtgggcgaaggatatgaacagacacttctcaaaagaagacatttatgcagccaaaaaacacatgaaaaaatgctcatcatcactggccatcagagaaatgcaaatcaaaaccacaatgagataccatctcacaccagttagaatggtgatcattaaaaagtcaggaaacaacaggtgctggagaggatgtggagaaataggaacacttttacacagttcatgggactgtaaactagttcaaccattgtggaagtcagtgtggcaattcctcagggatctagaactagaagtaccatttgacccagccatcccattactgggtatataaccaaaggactataaatcatactgctgtaaagacacatgcacacgtatgtttattatggcactattcacaatagcaaagacttggaatgaacccaaatgtccaacaatgataggctggattaagaaaatgtggcatatatacactatggaatactatgcagccataaaaaatgatgagttcatgtcctttgtggggacatggatgaagctggaaaccatcattctcagcaaactattgcaaggactaaaaaccaaacaccgcatgttctcactcacaggtgggaattgaacaatgagaacacatggacacaggaaggggaacatcacacaccagggactgttgtggggtgggaggagaggggagggatagcattaggagatatacctaatgctaaatgacgagttaatgggtgcagcacaccaacatggcacatgtatacatatgtaacaaagctgcacgctatgcacatgtaccctaaaacttaaagtataataatgatataaataaatagataaataataatggccctgtaaccccaacactttgggaggccaaggtgtgtggattgcttgagcccaggagttcaagaccagcctgggcaacagagcaagacctctgttgcctttttttttttaacttgctcactttcctatctccttatgtctaatttttcccctacattgtctaatagtttcctaaattttttcagtatggtcaaacgcatcccctaaacgatccattgctttatttggttgtcatccaccctagagataccatcctttgacttcacgatgtagtggttgctttctggaccagctcacacctcttaccctagcacttccttcactattatcccaggaattccctgttggctggatagtgttggattcctctttcctggaaccccttcatttccctttctcagattatttccgcattccgatgcagaatgtccttcatgagaggcgactttttaggacttttaatctgcgttcaaatcaattaatagtttgacggttatcaactattaggttgggaataaacatctctcagaaatttgcaagtgtttctctgttatctttgcctacaatggtgccattgggaggtcaagatcattctaattcctgtttcctggtattcctctttctctctagaatttgctcttagttctctgcattttgtagtgaaactcgtttctcttatttgatttttttgtttaagttcatttttttccatgaaagctatgtttctattgacatgacatttgagtattcattgcaaagctttaaaatgtgtgtggcccagtggtggctcacgcctgtaatcccagcactttgggaggccgaggcgggtggatcacctgaggtccagagttcgagaccagcctgaccaacatggagaaaccctgtctctactgggcatagtggtgcatgcctgtaatcccagctactccagaggctgaggcaggagaatggcctgaacccgggaggcagtggttgctgtgagccgagatcgcgccactgcactcctgcctgggcaacaggagcgaaactccgtctcaaaaaaaaaaaaaaaaaaagtgtgtggcccatccacatgcaaatatccttgtttctctgataaaattgctgattgtattcttgaagtgttgattcaataagtgttttcaaaacaacacttttttatttttttattttatttttaattacaaaagtaatgcatatatgcatttttatgctaaacatccaaacaaatgtagaagacaaaaaaaaaaaacacacttgttccaaatcaagcttatatcctccgcagaagaaaacactattatcaatttaatgtgtagctttcagacattttattatatgtcaacatggttatacatgcacatatggaaatagagagtttaatttttgtggtaagagttttttaaccaaaattgaattgtatagtatatactattttgcaaattcctttcttccatttagtagtatatcttagagaatttgacttataagtacacacatattgaatttttcttattaatgactgcataagattccaaaatgtagatatactatggtggaaatttctttcaaacttttcactacataaacaacattgcatgcttctttgtgcacaaatataattgtttctttaggatagctgtcagaagtgaaattgatgggtcaaatttgtgttttggtcttgtaattatgccttatcccagaatgatgccatgtggaagttagacacaggcccttgtgttttagaaagtgtggcagagccttctcaacttcagagtcacccagaggaagttataaaagtcagaagggacctatggctacatatagtgggccatgtctaataagaaggtagttttgttccagaattctttaggtagggaaatgctctaacatctgttagctctacctaagacaaatagaagattctccattaattccccaagtcaggaagtgataatgaggtacacctagtgcctgggtgtttaagatcaaaatgatagctgagtaattaattggcactttccatgtgccttttgtctttctagctggccaaataagcatatctgacagtgtgtggcaaatgataaactcccacaccaaccatgtggaggcccgtatctgctgcaaaaatcagttgttccgatttgcttttcagcaacctcagtggattgttcctttctatccactgcattttcacttgtctggaaggtctttcaagcaatatgactataatttgcaaccaaatctgatctcccgccatatttgccttctccttctttttcctggagacttctttcttctccctttaaaagcaaatatttttacttgaaagtatagtaacccaggtgaggttcaccttcaagactctccatctgaggtcaaactgggcatgtgacatttctcagttgatttaccatccacgttgactacccatctattaggcagattttggagacaacctctttgtcctcctaactgtgcaatggaattaggcttctcccttatcgacaatgaccccatacctaacttcagccttcctggaactccctttttatctaaacacttctcctggccctgatgaagaatgcagtccagaaggaaagccagtgaactttaaggtcaggtgctcctgtcccttgggagcaaacctcggtaaagactagatcccaaatgtgggtgctatatacaactagttccaccccttactatgttaccagtgttcccatggtgatgctgagaatgttacaaggacctttcactcagctattgtatcagttcaggctgcttggtctgggcatgccaataaccatatataaatgttttgtttctctttattctaattaatctgcccacttaacttggctggtatggcttctcatccctggcccaccttttatcatactctcacctttatgtttgctgccccctgttggttgctgtgaatcccagtgaatgctgtatgttagccaagcaattgcaggccatggccagcctatgcagcaagccaggtgttctgataccttttcttgcaggaatgggaatgtttctgaaccctctggaaagtgccctgccactctcacctgattctcatgcttactggtcccacctatggataaagattctctctgggaattgcagggaagctgccattcctacctagtatgatgtcccagtaagccacttgactgttgcccttaggtacctccccttccccatattattcttaatctttgaccttcccagtgccattcacacaatccataacagttctctcctaccctggaatattctctattagtctgactccacctttcaggagtttctcatggtgtatgctccactgggggcacccattttgctttctaatgcagttaaggatgtctatataggcatgtatatatttacatatatatatatggatttatgtttatatagctgtgtatctgcacaaatggcagacagacaatccctacctctctctccatacacacacacataaacacacacacacacatatgtatatatatgtatattctgcatatcatattataggatgatacatatgtatgttaatatcaaagggttcaaagaagggagaagacatgggaagtggctcttagtctgccatttgcactgagtcctctgtagctttaagaagaaatatcgatttatttcattggttgtgcttgtttttgacccaaatgttcactttagcccatggtctgatcttttcaaagacaagcttactcaagcaaagaaagaggaaagctccccattgtcacgtcaattatagataagttcatgccaacataatacctcctcctcatcttatttctgtagctcaggataaaaagataatctccaaaggaggcctaaaaaacagccacattaattaaaggaaagagattttttttttctaggaagtgcctaataactaacggacaagcaaaggagactcattagtggaagtatttcctttgaaagggcacacacgctgtgaaaaaaaaaaaagaaagggttatgccaggcttttctctttgtaaataaagtgacaccttttatctttttttctgttaataacacaggctggggagaatgagtctgagggaggcttgtagataagctggcaggatttgaagattattcagatctttagtttcttatttctctatgttctagggtaagacttttcttcattgttcatggccttgtataaagaatggttaggattggggatcttagggagttaggcttaagagtggtggcttagactccattatcccagttaactgatgaaccatttgccatgaacacctttggtaggtcatgctccatttagcaactgggcagggaatccgatcacctcaaacactacattcaaacagaaaggcaaaagatgctataaaagctagatggagagataggtggatacacagataaataaacctgatagaaagatgatagatagagatataaataagtaggtagataaatgaatagataggtaaagagactacagaataattagctaaattctgtagaaagacctaaaagggaaaagatattcacaagcgggggcattcagggtgagtttgaatctttaaggagatttcaaaaaggcacagagtgatgtctaggatttgcatgataaactggaatcttacttggagcacattttaccaacaccccataatgaaggttacacacagaaacagcctcagactctccagaaggaactgtcgaatttgatgagcacacatagagctagactaaatggatggggtgctgaggctgggcttccataccttaagtacctacgaatcatgtgagtgattaaaagatttcttaggtcaggcctaatttctaatcatctctcactcaagccagcatatggccactgtatgagttcaagagtgagcatttttttgaaacgcagttaagacttcagtttcctgcaccgaagaactaagtcactggcaacttgtcatgctagagaaaaaggcaggggacaattccatctcaggtatcatcacttcacgttgcttaccctacctacctaaatccagctagcatgtttgctcagccccacgtcagctagagtagaaattacttatccacttctcctctacacaaacctctctttatgagtacaaataaggaaaacaagcctgccaaatgacagtttgtcattgcaggagccatggccagaatccacatttcccatatctaatgagtgtgactccagccatgttcttcatttacatttatatcgttcacaggaatccatgtagccctgacttttgtgggcattgttatatcaactccacccccaccattgccatctcatctggtttgggagttaacaaagctctgtcatcttctgagtactgtgtgagatggcccagaaaggtatcattgttctcacttgggaacattgttcccactaaatggagagatggaggtttatggagctaacagtcaaagagtagcagtcacatccaggtcttcagcagcaccaggcttggccccgtatacatgaactctgactgctccatcactaacaaggcacatctaatctggaactgtgccttatgctttgctaactgtgacatacagcacactattggcaatggctttcgtccactccatccaccatcaccactggctctactttgcaggagttatctgatccattttctctgttgtttccttgtgagggagagcagacatgcacaagctattgtcaaaggacaaattacaacaaatttagtttaaagatctcgctgggctttatagcaattttagaattggtcaacacttaattccataaaatagaataagtgttccaatgagcctagcagaagaggttggctttctagacagagaatgtaattgtactaggtttgttgcccgatgtgcatggcaaatcaatatgccaagacactggattgtgacagagaagagatttaaccatagggccaccaaatgaggaagagggagggaaaatcaaatctgtctccccaaggagtttggggatagagtttttaagggttatggagtgggctgaagcatggagattgttgacggggtgaagagtacagagtgaagtcatgggacagggagataaagaaactatattctcactctgatttcattactctgtggggggtttcaaactggttggcaacaactgttttgctggaattcaggatctggaaaacaccttaagcaattcttaaacaaaagtcttgtgattttaatgtcagagatcttatctataggaacaatggggatgccagtggtcaggatcagtgctctgtgactatcaggttcaaggaagtgggtaaaagtgaaggctgattatttactcttatttataactatatttctgtccagaattcttcttaaccctgtgaggatggcttcaagaagggttgaagaaagcagaaacaaagaacaaaggatgtattcattatttttcaaagttactttttcttgtcgggtgggaacagggaaatagaacaatagaaaaataactgattagttaacatcaagtcatgtcaggctacttattttgtgtaaggaatacagcagaaggaactttattaccatgtcgattgataattaaaactgacctgcttggaaaatggctgttatttctgtctcccgatttctcagaaggctggataatgtcatagtttaggtttggtgatgtagaactttagcatgggtgactctattttgatctttagtctggtctgttgaagtctagtgcaaaagtttagtccaaaacaacaacctcctataatttttaacactgtaaatctctcactagccctgaattcttcagtagactgtattttgagctcctgctgcaggcaactgcagacagattggccacataagagcagtagccttcagaccaaagctcagaggaagtgccaaaacatgtacaaaccctggatgggttctggccttggcaatcatgagccaccattactgttaaggaattaggagtggaatagtggaattttccttgctccagattttaaggacacactcaacttcatccaggccccagcacatcacagacccacctatgagtcagtactaatggcagtactagtggcctcaaaggacatttgaagaaaaattgttacttaccagaccccaccagagctgctgagatgatcccatgtaaccctaactacagagttacctttagcttttttcagttaaattgtattttatgtgagttttaattgacacaaaatataattttgaaagcctgcaaaaaaatgcataaatgtaaggcagaaatggccaggacattcctccaaataactctgcctggaaaacaaaatcttgctgtcattactggattgttcttgttttctccacatgaacaaggtttggataatgaagtaacagctcttcctggagccccattgccaaaaactagcaataaaggaagaccttactacctaacacatgtggctacttgaaaattatctgaaataaaaacaagccagaatcaacataatagtgtataacaaaacccagatgtctcttgaataaaaggttaatcaaatgctaatgttaaacgaaagagtttcaaaggcaggaggaagaatgttagagataaatgaagaaattaggtgcagcctctgtatgacttggaagagcaagctctctgcacaggatcgtttttttgttttttttaggaaattaagcttttctttcacacctagaatgtgtcagatgctttataagaaaggcactaaatacttttccaggagcttaatcttcaaagtacaatctactaagatgtacctggaggaagaaaaatgtagcaattcttgcaaagcaatgctttggatattacctttctgccatattttggtagacgtttatatataaatcctggtttggtcaggaatccagtaagaatttgcaatgtttgtaaaagcccacctgctttgctcatgaattgcagaacagctcatgcctccctccacagcaccctctgccctggtctccatcccagtgaagggggttgtgctcacagtctgtatcagaatcagtcagggttctccagaaaaacagaagcaatagggtgtatacatacaggttgtatatgtaaagagagatatttattttaaggaattggcttatgcaattgtgaaggctggcaagtccaaaatctgcagggcaggccagcaggctggaaatgccaacaagaatttatgctgcagctcgagtccatggcagtctggaggcagaattccctcttccttaagcggaccatagtcttttctcctaaaaccataagataagacccacccatattttgagggcaatctgctttactcagctctgctcacttaaatgttaatcacatctaaaaaaaaaaaataccttcacagcaacatctaaactagtgtttgaccaaacatctgagcctcgtggcctagcccagttgacacataaaattagccacacatccagtgggcaagacagacaaagtcacaatagacatcgaaggctactggcggggactgagagaaagtggggagtctacaagggtgaaggagaggaaagcaccgtgaaaaatacttgcaaatatttattcatgaggtcgggaggcatttcagggatcttgcaccagcatgtgcgtgtctgtgtgtgtgtgtgtgtgtgtgtgtgtgtgtgttaaaatggggaggaaataagagaatgatacaaatgaagctgaggaagtaaacaggtcaaggaggggagggtggattctttcttgtctgctcaagcataggagcaagtggggtcatgcaattttattttataactagtggctaagcatccacttatcttatggaagaaggtcctcaattctccaagaaccctggtgcttcagagtcagcagtgccattagcaaccacaggtggcgctgtcctttctcaggagagcaccaatcctacaactcctttggttaagattataaccctggccagccagtattcccccaagccaccctagtgggaggcctggggagccttcctaagcccctgggctttgtgtcatacctggccataaggcttgcctgccttcatgctccagatagctttactctggtggcctcgttgcccttgcctaacacctgaccttgatgtaccctcccccagctcaccctgaaagagcagcctgactgggaatctggggatggggtgtttttcctttctgtcccagaacgccctgtcttcctcatgcaaggtgatgagctctcacccaagggctggctctgcaggctggatcacacagctgtacatgcccttccccacttcccattctaaatccacctgatcaagctggactccttcaccaggcccttccaggaacggacaactctgctctgaggagatcccttctcatggaggatgactcagcatgtcctttcatgcagcttccatctaacctctacctcagcaggtgtctgctaccctagggcacatgaggatgctcccaaagccagcagaaatccaggacagcatttcaagaaggggagaggccagggattctgcaacatggtctgtcacagaggagggtggcttcgatggacagcaatagcaagaccagagcaggtgcaattccaagggtgcaaagacagctctggatgctggagaaagtcaatgacagtgagtccctactcacctgctccaccactaatggctgcagcaatgccacggctcatgttctgggctgaattgtttccccccagattcatatgttgaagtcctaacccccagtacctcagaattagactgtaattggagattgggcctttaaaaggataactcaaatgaagtcactagggtgagtcttaatccaatataatgggtaaacacccatgagaagggcaaatttggacacagacacacagaagaaagaccacaagaagacgtaggagaggaaggccatctgcaacccacagacagcagtgtgagaagaaaccaacccagatgacaccttgatcttgaacttctagtctccagaatcgtgagaaaataaatttctgttgtttaagccccccagtctatggtactttgttacagcagccctagcgaacaaatatactggcttcaatctaaatcaacttgcagttagcaatttcaaaagactgcgtgaagctatcccaaaaggctatccgcaaaggaaagctgcgttcttgtgcagtactattaatagattatagaaggaaataaggatgacagatgttactggaaaccaccttgtgcctagaaagaagcatttcctttctctcaaccgaaggacagcagcaaggtcccagatggtgctgaataagcaagtgatcaaatatcttatcattttggatataaatcaatgcagtgatattacctctcaaactttgctcaatcacttagccttgttagattagtcaatatctaggttgaagagcaaaatgagaattggaattggccttttcaaagtcagatttgtgtacctaaaacaagccaaattagttttgcattaaaaaaaataacacagcaagtcacatatgcatatttgagggtcactatgaagctccttgtttaacaactaacactgattgtaataattgtgccactgtggttctgaatgtcaataatgggagaggttctgtggagatggggtatatgggaaccctctgtactttccactcatttttgctgtaaacctaaaactattctaaaaaatatagtttattaatttttaaaaactgaaaatagtaactatttaaaaatactttgactattcaaaaaaccaacacatcaattagtctgtatctatcaatatatatattttagagagtatcactttaaaaataaaaattacccatacccaaagctaaacatcacttaactttttttgtttatatcttttcagtgttttgtctctattttttttattttacaaagctgactttctattgtaaaatcaatgtttgttttactttcctttataatatagcttttgaaagctgcaatgtttttcattgtatggttatagcatcatttatttaacaattcctctatttaggaaaaatggccatttctaattttttgtagtaaatgagattcaaaaaacagtgtcaaaataaattctcttttgtactctttaatgtacatctgattatttgcagaagataaatttctagaagtagaattggtgcattcatcagtttgctcattgtttaggttttttaatacatctctgtcaagagggtattattagcatttttcctctgtcatcaatttggcaggtcagagatggcatcttattttattttaatttgcatgtacttgatttttagtgaaagcaatttttttccacatatttctcaatcatttatagttttctttggtgagaagacaggtaccttgagtgtgtggcttacagcatctatcacagatcactgcctggcacacagtaggtcttcagttagtgactgaattaatgatttaccctgtgttcttgtcatcttttgggaagtgctccacttttccctaaggatctgtatgatcccattttgtcataagaatatcagcccattttctaccattcatatggaaaatggtttgttctcttttctcatttaaatttctaataatcatatttgtccctgctaattatcaccatgtgcccagcctggaatgtgtactttacatattttatcttgcttaattcttaccaccaccctaggaggtggatgttatcatcctgtttactaatggaaatattaagactactcctagacgttaaataactggccctggtcatactctcaagagacagtagcacctagttctgtctgatattccataagccttcacctacagtgctatatcgcttccttttaaattatatttatgtgggatttttgaaggaggtaattgtctttgtctattttctgctgctgtggcagaataccaaagactatgtaataaagaaaacaaagaaaagaagtttatttggcctacagctctggaggcttggaagtccgagagcatggtgctggcatctggtgaggaccttcttgtgttaacccatggtggaagggcaagcaagcatgtgagatagcgagaggaaacggggaccaaactatactttcctgaggagcccacccccacggtacctaaaccatgccctcaataatggcatttatctattcatgaaggctccaccctcatgacccaatcacctcttaaagttcccacctcttaatattgttacagtggcaattaaatttcaacctgagtttaggaggggacactcaaaccatagcaataatatattcacctgcatcaaaaataatatatataggtgtgaagtttaaaaaaaaaaactccttccctcatttgctcatttttacccctacttactttaaataaccactattactaatgttgcacatacaaccttcttgagcctcttttatgtatatacaaaatatgcatatatattcttctcccatctttttacacagatggcagcacactataaacaccattgtgtacctgctgtttagacctttcttattagtacatgagcagcttccttgtttttgttgtgttttgttttgttttgtttttgtttacagacaaatgatattccattgtatgaattgattacattttagctaaccagttcaaatgttacttaacatttgggttctatcaatcttttgctataacacagtgttacatttattgttgaccacatatgcaggtatatctgtaagataaattcccagaaatagaatggttacagcaaagggtatatatatttgtaattttgatggatgctaccaattgtcctccacagcaattgcagtacttatatttatggtacttctgaggtatagaaggtttttattttatcagttagaaattgtgtttggctgctaggaacagagacctaaccacagcagcataaacagataagggttttcttttctcacagaaatggaatctggaggcaggcagtatagagctgatatgagagctccacaaagtcataaggaacctaggctcctttatttttttggctctgtcattctgaacatataacttccaatctcgagatcacaaaatgactgctgaaactctactgtcacatccctgttccagacaagaaaatcaagaaaaatctaggggtaaaaagtgtctttcataggagtccaaaaatatcattgcccacaccttttggcaagaaatattgggaagtataattttgtgactgagcacattgcagtcctcagtaatataagggttctattaggaaggtcgaatacagcgcatggatattgagtagataagcagcaacctctaaatgtgtcccatatcttgatctttttattcatagagtcctcactccaaaatcaaatacatattacctgcatttctttttatttctttcatggcctcaattttaactctaattcattttgcatttattttagtatgtagtattttaaagcattttttcttgttttagaaagaaaagaaaggccttaaagatctgcccccattccatctttccaaaagaaagaaaaaatatttctatatttataagataaaattacaaaagtattaggcaaattaattaacaatatgcatctacatggttaatctatttggaatttatttttgtgtatggtgtgatacaggaatttcttttgtagttagctaattgactcaatatcacttactgattaatttatctagacctgattgtttgaatttattatatacaaatggtttaaaatcaaatatttggattcaatttccattaagcttattgattattaggaagaggagaaattgatacctttacaatgttgggtcatacccttcaagaatatggcatatctcaatttattcacatctggtgggttcttcagcagaatatcatcattttctttatttaggtcttacatatgtcctgtaggtctagtctcaaggctcttatagctgggttattattgtgaatactttttcttattaagttttctggggtgtttttttttatttttgtttgagagtgtctagctttggggcccaggctggagtgcagtggtgctatctcagctcactgcagcccctgcctcctgggttcacacgattctcctgcctcagcctcccgagtagctgggactacaggcacgcagcattatgcctggctaatttttgtatttttagtagagacaaggtttcaccatgttggccaggctggtcttgaactcctggctttaaaggatccacctgcctcggcctctcaaagtgctgaaattacaggcatgagccaccacactcggcccttattacattttctaaaactttattgctaatacatagaaaagctatgaagtttttacatgttgattttctccagcttgctgaactcttattaattaaggcacctataaaatgattctctcaaattttctaagaagaaactctcataaagaataaataatggttatttaacttgtgttttataatatatttatatctcacacatttttcttgctgttgttttggctacaacctccagactaatgaataatagctgtcagtgtggacatccttgtcttgtttaagattttaataagaatgcctctattttgtttttatgtcctttggcttctaacaaattcccattatcatgtttcagaacattttttatgtttctaatttatacagagattaatcagacatggaaattttatcaactatatcaagtatacttgaaacatgtatccacataatcacgttgcattttcttttaacgaattaatttaataaagtgtattatatgaatagatttcttaatataaaatcattttgaaatgactagattagattttactttgtcatgagattatgttttattattctttggattcgatttgtcaatattttatttagaattttaaaaatctatattcctaagatatatttgtctatagtttcctcttctggcagccttcttctcaggaattgttcagcccaacaaatgaactggaaccttcgtgtttttctgtgcttctttacagtttaaatggcaaagaaaacatgcctcttgatggtcaatgtaactcatttttaaaatgggctggtccagtccctttttgaaagtgtatctttggggtttcaatttcttttaagcttactgtctatttaggtttctaccatttcgttagtcatttttggtaatttacatgttccttgaacgtacttattcacctcaattatgaaatttgttgttgtaaacttgtataaagtattttcttttttttttttttttttttttttgagacggagtcccgctgtttagcccaggccggattgcagtggcgcgatctcggctcactgcaagctccgcctcccgggttcacgccattctcctgcctcagcctcccgagtagctgggactacaggcgcccgccaccgcgcccggctaattttttttgtatttttagtagagacggggtttcaccgtgttagccaggatggtctcgatctcctgacctcgtgatccacccgcctcggcctcccaaagtgctgggattacaggcgtgagccgccgcgcccggcctgcagtcctcattttaaggcctgcgtattttatgcttctccagtgttttcctttttccctttctagtcttctgctggaataaccaactttactttatttctcctgccctcacacatgaaggttagacagtttcatactgaattcagaagccacaatccattttcctctgagctctgtaaaatatatcacatgttctcttagcatttggtatttccactggaaagtctagtacctgggaagctccatttgatcctccttcctttataatgtttttcccccttgtctaaaagtttataggacttttcctttatcctataaattcagaaatttcactagatgtgatttattttcagtaatcttgtctgtcattcagtgagagttaacaatctgaacactaaaacttttctgcaaatcaaaaatatgtttgcctgttttcctccatctcctctgttctcttcttctcaaactcttattacataggtataagacactctaggtctctcaacacttcttaccctcccttcctttacttctttctctttgctctgggataattccttgaattcattttcttatttattagtttggtgtttagcaatgtccattttattgctaaattaaatctggaattttaatagtttttaattgcttggagagctctctttttcctatctcttgtttttctcatagcaaattgttcatatcatagtgatagaagcatccctcacatttcactgacattcaaaattgtaataatcttccctgcattttcagttgtttcagtgaggtctgcatttatacgcagttaacacacacacacacacacacacacacacacacctctctcaagagtttaatgcatgccagatattgttttaaatgccattattaccacttcccaagcaaggagactgggcagagcctggaagccaacccagacagtctgattcagagccaggaacactctaccaccgtgcaataccagcatttgttctttacgctcagctgggtctcctatttcaagttgctacttctacagatttgtccctaatttttctatctgcctcatttttatttacttatttatttattatttatttattgtatatttatttttatatatatttatttatttatattatatatatttatttatttatttattatttattttagagacagagtcttgctctgttactgaggctggagtgcagtggctcactgcagcccaactcctgggctcaagccaccctcctgcctcagccttccaagttgctgggactacaggtgtgtgccaccatgcccagttaatgttttaaattttatttttgtagagacgggggtcttactatgttgcccaggctgttctggaactcttggcctcaagtgatcctcctgccccagtctttcaaagtggtgggattacatgtgtgagccaccgtgtctggcctctcacttttacaaataaagataatgtatccatattgataaccactgtggcctgcacccagcccctcctcaagcaagctgatagcagggcatccacaaatgtgcttgtgtgaggggtggcacagacctggggttcaagccatgccagcttctaagggtacacaaagttatagttccataacctcagagggtgcaggactctgatgtgtttcaaagccccagaatctggtgtctgtccgattttactgctccagcctctgatggccaatgagcagaaatgtgactgccagtgtaaagcagcaagacagcctaagcaaagcaggctcccttgggccacagacgtggcttggcaatggtgagtgccaagggcctctgagcaggacacagggtccgctacacagctcagcgtctcaaaaactcccaacatcccagaacaagacagagttaatcagctacataaattgagttaattagctacataaatcatgaaatataagttgttcttatctaaaattataaagaattaccaacttttaaagataaacattaaataagatgaccttttgtagacatccctactgctgacactgccaaaccactcgcgcccctctcagcacttcacctgtgctcacctggacgccatctgtttcctgtcttccagaaattcttccaacctggcctgtcaaactcagccttctgggttttccagctctgttgcatattttatcctaaatgaacatcccttcagttatttcagcagaattttgatagggaaggaaagagagcacgtgagctcaaatcaccttaaaaatgagtcttgtatttctggcagattttatgctgcatatttttaaattaattatcataattttttatcagaagaaagtgtgagaaggatttttcttggtgaagtcacttcaaccctaaaagtttgggtgaattcacggctactgtaaaggtaagccacaagcccacttacgacagctcttcacagtaagataatgtatgtctaaagatcctccattcgttggactcaaagatatttatttttgttaaatatcatatttccttgcagaccagagagcagcatatctagagagtaagctaagcttaaatgagcttcagagtggcccctttatatatttatttttaagggcatttaaaaagattaatgtatccatgacataagaatacaattataatcgtataaccttcattaattaaaagagctgacgtttaagcagagaagttagtaaacagggtattgtatgcagtggggacagccaagttcaaagtcaaaaaaggagctgtttacattagagaaatagcaaagagtccgaggtagcaagaggagaaggaagcagagagcgatacagaacagtgccagacagagacgtggagtccagatcctgttgggtcttgtaaaccatggcagtaagcttgcatttcctttgaagagggaagtgagaagatctgggatttgggagagtagtttggtaactccattgaggtggtgttggtgagtgtcaggtgctatggtggagttgcctgggcagagagagctatgcatcctcgagcatcatctggggaactaggaatggacttatcatgaatggatccagattcaacactaccgtctgaagcagcactagctcaggttgactggactgtgcacttcaggctgcaggaggggctcagggggttgccatgggtctctttccaggactagcccctccctggagcttgctcattacatggcaatggcaagagcggtttatatactttgacaggatattatttggttcagagtcatcagggttatcctcttcgtgaatgtccttccttatcaatataaaatcatatcatgtaatggtttttgcctttgagtctacttcttccaggataaacactgccacctttactgtcttattattacatcagcctgatacacctttgctcattccttcattttttgccttcctatgtcagttatttttaagctaattttttaaaataacatacaattggattttgcattttgatttaagctaaaagtatttttattttagtaaagcactttaagatattttctatgtattatcaaaacaaatacatttgctcttataacttctagactagctcctttttccgccctttattttatgcattatatttttattgctcttttccttcctcttacgctttgaaaacttaatccatctttttattcttctcatggttgtcataaaatataaacatattttaacccattttctctaattataaaatgtcaactatcaaacaatatttattatatcaatcctgagtaagatactaaattttagcacactgttacttcctctgtacttgactacttttcaattttaattgatagaggtggggtttttatgctttgctttcagccaccctcctccacagtctacattttatgactcagcttaaaaggaatggttctcaccacatagaaatggggtgattttggccccaggggacacttggcaatgttgggagacagtcatgattgtcactggtgggaaggtgggtgtttgctactggcatctagtgggaaaagaccaggaatgctgttcaacattctacaatgcacaggacagagtccacaacaaagaattgtccagcccaaaatgccaatagtgttgaggcaggaaaattccattttagaggttttgtggctcttatgataattgtaagttaatattactcattgtatttaaattatttttaccaccagtactttcatatcctcactcttaaatttttaaattcctgtttatccctcgacgggctagaaaatatttttaagtaatttttttttcaagtagactctatagaaaggaggaattatacttccctaagctgccagtatttgagcaaatctttctaacactctcagacacactcactggaagcagatgaagctattagtcagtcattccccagcctctgagaaggaatatttttcttgtagatgttttccctcatatatttgcacatgttacacttccatttgttaatcgcctgtccttatcttacccgtttacctattcctatagtctatgatgcaatacttttatgcattttagctcttgcataatgtatgtgttacaaatatttaacctataatatttaagatatcactgatacttaatatttctaatttttaatgtacagaaagtttaaaagtttatttttttaaaatttacctcactgtctcttccttcacttttttgctagaaaggtcttgtctattctgagatcaacattttcctaagtgcctcatctatttgttttcacatgcgatcattttaagccatgaggatttattttggtgtttgaaaataccctcaaattgttaagcaattctcataatttggtttattaaataattcatcctttcctctctaatatgaaatgctacttttatggtgtaccaaacacaagggcctgtttctgcagtttatgtcttgtttcatcaaatctatcttttcttaccctaaattttatttcaattattttggctgtataatgtttttatatttgccagttttccttcattacaattacttttaacaaccatatttttaattttccttgcccatttattctttcagaagaattctggagcaatttaatccagtttcaaaaaaatagcccttgggacttttggttagaattgtattacatttccaaataccggaagaattattgcaatactagatatcctcagcccatcttccatttctcttttcttctacaatttttatttctttattgtttcctctgagttctggaaatttttcttaagtttaccttttccttcgctaatccaatttttcacataatctgccattcttctggtgcaggggttttgaatgtagtaatcctatttctgttctttatgtgatccttactgatatcaaatcatttcattttggggactctcaggtctattttcataactttgggaagtagaaaaacactctttcccctatcccttgctatatgtctattttggtgaaaagcattgactaactctttggaatgaacaaagctagtcttcttagagtctagggatgtctctgtttttcctcgcagagacaggtctgtatttagcccccttgctcacagttgagagattgctgtccacatacttcaggcccagaaaaggaaggagtgaaatgctgagatttgctctggttttatttcacctgttcagagacccaggggacagtgtcagagttcaagggatggtcacaacatccagcctgactcccaccccttctgctgaggcagccatgagttagccccagcagtctccacagttcactggctacacctgccctcattagaagtccacagccctgtcctcccaacagagccatctgtgtctattgaacccagtgtgtgcactgctgtgggcgcctgttacccagtggcattgatggaattaaaatgcatctccccaaggcctggccggctgagtgacagggcatagatgggttccccagaggtccttgcccattccccagaggtccttgcccagcctatctgcatgaaatatggaagaaatgctagctaacttaaattatgcatgttgtctgatttacagcccaagtataggtttcagtttttgcatcccttttagttccttctgcagtttaggaggatgacattgacatctgtgtccaactcgctgtctctctggatatttaagaagtagaaaggtggtcaagggaaagttgaactttatttatgtctcagtttttatagtgagaatatttttatttttctcatttctcattttcatattttttagttaataaaaatagaaaggttttaaacaataaagtccaagataattcctaaaacactgaatttttcctaatgtgagttgagactttaccaaaattaccctcaaaaggagcaagttgccttcaggcgaagtcctcacaaagcctcttataatagtgtgtaatagtaagtgctctcaaaattatattactcataaaataaatttgtatttaggagaggcataatttcccttaaccttaatcaatgctaattgagctcttagggaaatgacccaatgaaataagtataaaaaggatgaaaagaaacttaatgaagatgtagtcactattgcttgggaaggggcctgcacttcaagagtggggtgtcgttgttaaaaagccttctaaaatcaatttagaaagcaagacactaggattgcagaccatcatctacaggataagcaaagagagcaaatgtatttgacgttagaaatttgggaatgtgaacttaggtcttaggataaaatttccagcactggctggatgtggatgccaagagttctgtatctcatcattttggtggaggagacattgctagcagctctgctctgacaactctgtgtgagactcaaaaagcagctggaggaggaggagggctctgatatcaaaggccccttggaggagttaggataaaatagtgtcaagaactgtgagagtaaaaaagcagtggtttgaaatcaatattccatatacataattttaaatgtgtgtgagtaaacaaataaattaatttccataaggagacatttgactgattcatctacagtccaaagagctttgatatttaagttgcctataaaacattttttggatagtcttcttggagaaaatgggatatcaccttatattagagattggagatcaccttttatttggatttttatttatataaaaatacatatattatgaccaggcacggtggctcacgcctgtaatcccaacactttgggagtccaaggcaggcagatcatgaggccaggagttcgagaccagcctggccaacatggtgaaacccagtgtctactaaaaattcaaaaattaaccaggcgtggtggtgcacacctgtaatcccagcttctcaggaggctgaggcgggagaattgcttgaactggggaggcagaggttgaagtgagctgagatcatgccattgcacttcagcctggtgacagagcaagactccatctcaaatatatatatatattattatatttttttctcctcttcaatttacatacttggtacagcagccttgaccttcacaccaagtcaaagtgtgtgaacccagaaataccaatgtttaggatgtaggcaagtaaaaaaatcacacgttttgtctaacatctctccataggctgtccctgcttaacccagaacttcaggcaaccccaggccttgagaaaacaagaatattcttattgggttacagtaggagttttgtgctcaagtcaaaacaggtgatactaaatttttcttaatcttcgaattccatgaccctatatccactcaacaactccctccaccaacccatgtcagtttctatcaattattctttgtcatttgccctgagcatgtttaaatttaccaatttaaacatgctggtaaatggtctgaaccatttgaaaacaatctgaaaaacaattttttcagattgttttgttgctgttgtttactattgcttcttatgtcccattccttgcctccaggcctcatttttcttcttactgaagcacaccccttggtagctctttcagtaagggtctgtaccgaaaacacttttggagccctttatgtccgaaaatgttcttcacatcatgttcactcttgattaatgtattagttggtaataaaattctaagttcacttcctttacctcaagaaacagtggagctattctctttatcttcatgggtagacagccctgtttcaactcctgaattcacacagagaaccaggatccaggccgtgctgtgaatgagatttgtttgaccccagtcatcagaaaagctttgaggaacgcactgtgatgttgttattcagtactggttacgaatagcatggaaagcttcagatctcacccttttcccaatatgttgttggtgttgttattcttgtctcctgtttctggttgaagaagagctcccttccttgtttttgaacatggagatatatttaatattacccttttgtatttgatctatgtttggaatgagaagaaggctcaatgtgagctcactctgacatcttgaaccagagaacttgaaaaaatttaataaatctataatccatttttctcctaaacttttttctataaattctcatcttttctcatttgaatttccccacatctctaatgtcaagttgctttttcctatattgttcaatctcttgccaggcaaagggatgggtatagctcagtgatttaaaaatatatacatatataatatatatatttatattattataatataaccatacatatctatttcatatattatagataattatatataatatatattagtataaccatatatgtctattacatgtatattatatattactatattataaccatatatatctattacatataatatataatataaacatacaatatatgatatataattatatattaatataatatataatatatgtaatatatatgtatggttatatatttttaatatataatataatatatattatattaaatataatatatattatatataatatatattatatttaatataatatatattatatataatataatatatattatattatatataatatgatataatatatattatataatatattaaaaatatatactttttttttgagatggagtctcactctgtcacccaagctggagtgcagtagtgccatctcagctcactgcaacctctgcctcccgagttcaagagattctcttgcctcagcttcctgaatagctgggactacaggcacgtgccaccccacccatctaatttttgtatttttagttgaggggagttttcgccatgttgtccaggttggtcttgaactcctgacctcaggtgatccaccccccaccccgccctcccaaagtgctgggattacaggtgtgaacgaccgtgcctggcctatatatatatttttaagtgagacctctcaatttatgactatatgtattggaggtctctttccagaaccatatatatatacataatatataaatatatattataaccatatatagctattacatagctatatatggttctggaatgagacctctcaattcatgattatccaactgggagtcttttgggaaagttacttcacctctgtaagcctcaggtttttcatctacaaaatggagataataagcataacaatttcttaaggtggttttggagaattaatgatacttggtaaggaaagtgcttagcacaaagtgagcactaaataaacattagttattttattatgacctattgtaagtttttgtgtttttattcacattatgcaggatcctaatgtctagatatatttctgccacataatagccattcaataaatacttatgaaggaattaatagcagtaacagctcaaaagcctaaaagagagaaagtaacagtatattttgagttggggagatggaatttcagcataacattctttaatcagcttttcaatccatgatttcttatctttttaagagccaattactggttaatagatagaattttctgaaacggagcacaggaagctattgtagggacactggactggcaatctgggtagaagattcttttcctcactttttcttgtttacctattttctctacttagaaacttttctgtgttgtgtaatttccataaggcaacttacacatttttttaaaatctgtgagcctgatgggataattgattttgaagtcactccttctgagttttaattgcagctcaattcttaattgtgtgaccatgtacaattgagcttatgattcagtctccccatatgtaaaatgcagataataatagatagcaaaagtttttgcttattgttttcaaaaagaagccatagtagggagagaatttttcagtacccagaagctgcgacaagaatatagttaaaagcaattccacctggcctcctattgtgttttattttgttttgtttctgactgaatcatctgctacggttaagcccacctcagcaggctgcagctcctcccagctctctctcctttcaatctcatttcacaagcctagtaatgcttccattgcctcctcctgttaccatttttttgtttcctacaggttgagattcagtacgttctaagagggagttcagtttctgctccattgaaaaataattatgacaaagcagcattttccaaaatatgtttactaataaatgttaggcaagaaaatgtttctatggcccaggaatttagggaaacactcgtataaataatattaaacagatgtctttatcttaagactatttgacattttaaatatcagaagattctgtcgcttttctgaaaaaggggacaggataagtcacttgcaaaatgaaaatgtttttttttgaggcatctggagaactacttttatgaaaggcacatgttgggaaatgttctgatggagctaaatccaaagaggatagtaagacaagagggatgattggagggaagaagggaaggaatcgtgtgtaatctggtgacaagagcagcaccatcaaaaccccaggcttggctgcaaatctcggctctctgccacttcccagccatgtgattgaaactggtcactttaattcttttacaagctgttttctcatctttaaaatgggtataatactacatctctcaaaaggtcattatgagaatttaattagaaaaatcaagcacatagcctaataagtatgctttcaagacaataaaaaacataaacacagaaaaatgtcttattttccttatgtattttttgcattcctagcatttgcaatggcatcaatcatagtaggcactcattaaacttttgctgaataaataaatgaacaaaaaagctttatcaattcactgaataggtaattaatcaaacctttgcaggtttagcactatgccatatacacaaaaactaaacaaaatattatcattgtaattaagttgaacaggatgcattttgctactgttaggcattcgcattgtgagtgctacagtcttttcttagcctgacatttttctgcaaatgtgttacttccaaaatgagggcagaatttgcatgaataacgttttggtactaaacactgtatttattaggatgaaccatttttatagggctttctaaaacacaattatatggacataaagatggacaatacaatcttatctccctttagccaaagagtattgacaatgcaatttgtgcaaagtttatgtgaattcctgtagttcctcagtcgtttcttggtttgtagataaattatcatgttgagtagattctttgttttcaacttggcattttgatttgttttcttacttgtttacttgacaccaaacaattaaattatgcccccccaaaaaaacgcataaaaataagcccttcggtgactgaacctgcatacagactgatgcagaaaaggctgaagcttcccaaagaggattgtttgaattctcaaacagaagatggtcccaggcaggcaataactgcttctgtctagtgggcattagatttataaagtgaaactgcttttctccaagtttaaaagtataacatgtaaaagtttgaccaggcctcattgcacaagtggagtgctaatgagaaatgggaggactcactgaagggaggacactgttcgcataggaacagtgactcagtgcctcgcagtacccttccctgatttctcattattgctccatctatgcaagactgggttaaaccactgggttcactaacagaagcatttccagtgactccagaatctttttaacgtcctatgtaaagagttcagagcaatacatgatgaactgcacacaaactctttcggccttggtaactttcctgaggaaatagatgtcagacctaatcacaactcttttgccattaagtcttaggggaaagtttctcttgaaactatattggtatttagaaaaagctttgaatctaaatgtcatgcatctctcatttagatagataatttgtgagggaaaatagtctggatgctattggctcattcattcgttctactaaaggtggaatgatatgttaatgtcttatcagccaagtcaacctagaaataagaatgtcaaccatgttaaattgtaagattattcaatcttatagattataattccctatagcatgcagagttatttcacaggctttatcttcttaatttgacaaattttttagagaccctacttgccaagcactgagaatatgaagttgaataaggaatagtctctaatctcaatcaattttcagactaatggaaaagtctatcatagaaacagttgttatgagctctaaaatcatagatgaagaataattaattctcattgctgaccagaggtaaatagaaagaagagtcaaatttgagctgagagccctagagggatgaaagagagtttgtcaaagcccattctgaagtgaataacacggtcataagaatgagccatggggaatatgacaaacagcctggtgtggccaaagggtggtggtggcagtggcagaagagaagcagcctgagagatggctagggccagaacaagagccataggatctctcctagtacaggtgggcttcaactatccgcgtttttacatgttgctttggcaaacttgagagaattgatgaatgccttctatcccttcaccaagattgtattgaatcctcttccatatacctaccagcagtgttctaggctctggggatacaacatactccctgatttcatagagtttacattctctatgaaacagataattaatttaaaaagcaataaataaaaatctatatatcaagaaataaatactctgcagagtattaaagcatggaatattagtcttttctcactttgctataaaaaaacacctcagactgggtaaattataaagaaacgaggtttaattggctcatggttctgcaggctgtacaggaagcatagtggcttctgcttctggggagatttctggaagcttccaatcatggcagaaggtaaaaggagagcaggcatcttccatggcaggagcaggagcaaaagaaagagtgaggggaaggtgctacacacttttaaacaaccagatctcacaagaactcattcacggggagcaggcatcttccatggcaggagcaggagcaaaagaaagagtgaggggaaggtgctacacacttttaaacaacgagatctcacaagaactcattcactgtcatgataatggcaccaaggagatggtgctaaactgtccatgggaaacccactcccctgacccaaccacctcccaccaggccccacctccaacactggggattacaattccacatgagattttggtggcgaaacagatccaaatcatattacatgataatgtgatagaagataaataggtagtacaattagaaaagatggtcagaaaaggcctctccaaagagcctacatttgggctaagacttgaatccccccaaaaaagaactaaacatgcaaagatctgagggaagagcattccaggcggaagtgcaaaggtcccgaggacagaacaaattctctgtgttttaggactagaaataaagctgggtggctgtagtgaagggagttctgtacatgtatcaagtagctattgttgcataataagccatcccacaatttaatggcttaaaacaacaatggtttatttagctaagtattcttgcatgtcattaatttaaaccgagttcagctaggtgggtgtctcatacatctatggacagctgtgggtcatggaggcaactttgctgatcttagccaggacctctagcatttctggggttttcgtgggagcatttgaactgactcaactctgccccatgtggtctcccatcttccaggaggctagcccggcttggtgactatgtaggatcccaaggagagcagaggctcccaggcttcttgaggcctaacctgagaactcacacaccaccacttctgccaaactctatcacagagtaaatatcaaaggaaatcaaaggccagcccagatttaaagggaggggaaacagactctgactcttgatggaagaatctgaaaagtcacatggcagagggagtgaatgaagtagacggagcagtggagtattgtggccattttcgcacagtccaccataaaattgaaaagattgaccagagacagatcatggagggcttggcaatctgtactgatgaagccatggaccagaagagaagtgagtcaatgaagagagtttctcttttcacatggccataaaataatagtgagggctatgacagcaaagaggaaacaaaagctgtagtgatgagtgttagacaattgatgagctgggagagaatttgttgatccaaatgcaatcttctcatccttactgtgttccagaaagttaataggaaagctgaagttcaaaaacagtctccaaaatttatttaaaaagcaatgaataaaaatatatatgtcaagaaataataaatactctgcagagtactaaaccatagtgtattagtatgttctcacattgctataaggaaatacctgagactgggtaaattataaagaaaagagatgctgggcatggcggctcatgcctgtaatcccagcactttgggaggccaaagtgggcagatcacttgaggttaggagttcaagaccagcctggccaacatggtgaaaccccgtctctactaaaaatacaaaaattagccaggcctggtggcaggtgcctgtaatccctgctactcgggaggatgaggcaggagcatcacttgaacttggaaggaggaggttgcagtgagccaatatcatgccactatactccagcctgggtgacagagcgagactccatcaaaaggagagaagaagaagaagaagaggaagaggaagaagaagaaggggaaggggaaggggaagagaaagaggaggaagaggaagaagaagaagaaagggaaggggaaggggaagggggaggaggagagaggtttaataggctcatagttttgcaggctgtacaggaagcatagtggtttctgcttccggggaggcctctggaagcttccaatcatggcggaaggcaaagggggagcaggcatcttccaaatcaggagcaggagcaagagaaagagcaaggggggaggtgctaaaacacacttttaaacaaccatatcacatgagaactcactcgctatcatgacaatggcaccaaggagtgccatttccatacacgagtcattccaaccaccacactgtccccctgataagacttgctgagacatttgctgatacctaattggcttagaaatgcaaaagtacacctctaaagatgaaatttgaccctttcccccaggctctgtctggaggttgggttgctatcacgaggttaaaaaacattgatgataataaacaatcatgataatattttcttatgtggaaattttattacctgatatttgcaacatttaaaagagctaatgaaaataataatatattaatagccaacactggttgagaacttgccttgttcctcttatcttgacctctgagatgccaaaaataaatgttgccaatccatgcatgtgcagttattcaagctatattttcttgaattgaaatataagtcttaaaaccagtctgttccctcacagcagattgatttccttgagattagagagtaggtttcatttatctttatgtatctagtaggtcatatagcatcctgcaccaagtaggccatcaaaaaatattcatggaggcagtggctgacacctgtaatcccagcactttgggaggccgaggcaggtggatcacgaggtcgggagttcaagaccagtctggccaagatggtgaaaccccgtctctactaaaaatacaaaaatttttatttttgtattacgggcgtggtggcacacacctgtaattccagctactctggatgctgaggcagagaattgcttaaacctggaggggcagaggttgtcgtgagccaagatcgcaccactgcactccagcctgggctacagagcaagactccgtctcaaaaaaaaaaaaaaaaatcatggaaaaagtgaataaatggtcttcctcagggatagaaagggtaaaaaatgttttttaattagaaagatcaacaactagagtagtttgagcccattaaacatagagcaaacctccttggacaccctccattttcatgtctgtgtataaattgaacaagataatgaaaccttctgcttataagaaaaaatgttagtttctattctgcattgtagtagattttaaaaagatttccattgaaaacatctactttttaacatttggtgctaaatttgtaagttcctgtttccgaaaaaaattcacttaagttgactaatttatttcctgataaatattacatgaatatctcatatgaatatatttctttaaaaatttaggcacctataacctgattcttatcccaatagaagcaattaaggggcaggtggtggtatcacctttaactgaagtagtaagctgttggtcttccaaggtgacccagcaagcagatgactgaatccaaaagtgggtgatttatcatgtcattctgggagaacatgaagaagttctcagcttttagaatgtaccttaggccaattacgtgcacgttgacaaagatggatgtgtcttcattatgtagtttattatggatagatcagggctgggacaagaacctacatcttgtgatcctagtacagtacatttttaggaagcacaacccccatagatgaccctacaaggagcctatactggagtgaaataggaggctgtgagttttacaagacatcaaacaatggctgcaaacttgattttataggtttagtaatatctccagggaataattctctttccctttccctacttctgtaattggtatatactctaaatgccattagacccagcttgctctaaagatctgtagggatagtatttctctctctccctcattcagtatgtgcccatgtcaggcctaactgaacacagggaccaaataaatagaagatattccattcagattttatagcctgactgctttactctgcaacctctattattgagaattatctattttgactgcaaacacgtcatttcatcaaaggttctttacaaagcagatgacattgaaaagcagcctcacatttttcaggtttagagactagatttttatggacttggaaacttggaagtcagctcaccattctggcatagtcttcctgccaagcccaaattctgaaatcagtgtgggagcaatcagtgggtgacatccatctcagagtcaaagaaacaggggacttctgattccttgtaatttctctagaagtaaatcctcttttccttgactggcactcttctcttttgagggccaataacaacctactcattaagaaccatttaacattttccaaaaatacttccaaaaccattaactcatttgatccatgtatcaattctatgaagtcagtaggccaaatattaatatttgtagtgaacaagaaagccaagcacgaagtgttcaaaaaactaacccgacaacaaactgaaaccctggatattatcaggataacaaaaaaatcacctgacctgacccccagttaggaaatttcccactgtcctatgcactgttctgcacacagtaggaaatttcccaattaggggccaggtcagatgattttttttgttattctgataacattcttctcttctagactatgagaagagaggtgctgtagtggtggagaagcgagtgtgtgtgtccccaagaatattttaggtatggccaccaagttagccctaaagaaactacaattaaactaggaaatagagcagataaactctgtgtctagaattctaaacttcttagatttatatgtcctaaacccaagtctttcccgtctcttttcaggctgttcccacaagtactgacattacttccaaagaggagaatttgggtcactaatctagcgaaagcatcttcccctctgaattcaccatcaagatgaatgctatccactagaaatataaaggaagccacataggtgatcttaaattttctagtgggcacattttaaaaaggaagacaaggcaattaaaatataattttaataatatatttcacttaacccaacatatccaaaatattaccatttcaacacatgatcaatattctaaactacattagtgagatagttacactcttattttcattcttagtcttcaaaatccagtgtgtattgtccactcacagcacacctcaactcagaccagccacgtttccagggcctcaaagtccacacctggccaggagctgacggtctagctcctgtgagtaagctagtcctcagattttataaaactctctcttcagggttgtgctcaccttccccctcccactcctgctgctcctgacctccatcaccagaagagacccccaagagcaaatcatatttttgtttccaagagggcccactgacaacactaaaacccaggaggaagcagttgacttaagaccttcgagtgactcactttgtaggaaaagcagagaaaggctggcaaacaagaaaaacataagctcatttttctccccctcatcaacctcattccccaacctgtttgcatcctgaagagggcagaggcctccaaagttgctttagagggcagaggcctccaaagttgctttctgggtcactgcggggtgattcacccaacaataggctataatttacaaggtttttctctgcaagtcaactcttgctaatggaaggacgacatgaatgttgaggctgacaggctggaagataagagtagttgtttgttccctcagcccattgaaaaatccagccccaaacccatttgaagaacagttcctaatagataatgagacacaaatcgtgtgtacctgattgtaaatgaatagctcatatgcacaaagcaaactgtaaaacctccatttctcagccaggatagcactccattaatgatgtgcttttgtttcttccaaagactaagtgctcctttccaggagaaaatagacctcaacctcacctccccacccaccatgtccctacccccaccccaaagagactgcattaccctgagtattaatatacattgcctaacaaataggcaggcaaccaaaaactgagcaattttagccatttaaaccctgtcttgaaatagcaactcactggataaatggacctaccatttagcaattttcaagatttccaacctgctttgatttcctctctaggtagttttttattttgtgtttcagcgggcatcaactttgcaatatcaggaaaaaccagagccaggcttgaaaataatgctgagacatctagactcaaacccgggacacaagtgggaatgaatcaagccgggaggatttttccaaatctacaggaagtgaaattcttctgctccaggcaatgtttatcacccatgtagaaacctcattggtttggcaattgtgagctaacagggtatggcctgagttatgctctgaatagcttacagttactgccttggatgtgaacgatttgggagggacaagtctgtgcagtggcctaaagtgaggcgtgagtttgtgcctagcttgtctgtgaaattgggtttgttttttctgcttttactacacattaagccagatgaacacaaggacaccagttgttacttttgaatgatttttaaaattacatctctagtagggaatattgatttactttattgattttttaagatcctttctatttctttagtgtctgctagtcagtggcctcaaaaattgaattttcacgtgttgtctttgccacttaacattatcagaagcttcttgaatgtttactaatagaagtgtgactcctttcatgcttgctgtgtctaatgttatttttgtgttagcaaaattgctcttcaggaatatgctgatggctaacttgcagaaatagagatttaggatagacataatgaaggacttccctacaacactggatattaaatgctgaaaaaggcttttcaattccttcctgaaataagccagggccataagcacttagcccactctatcgaagtctccccgagaaaaccctgcggctttctctgcggattcctccagcccaacaccgaggaaccagggcctgggacttctggagtccctcccaggactaattcccgctctgatgcccagcacaaatttatcataactgcctgactctctcagtgtggtgtggtggtggtgatggtgtgtgtcttcctgagtgtgttggttggggatgtggtgggaggggttggccagagagttgaataaagaggaggaaaaaaaaaaaggaattagatttttcagaactgcacaaccaaagatttgcacacttatttatagaggtgacccgtgagcttggttgaccctggatgcttttctgcgctataagggaacccgtgggtggccgatcactctctggccctccagagggggcctccctcctgcgcggaaagcgtcccggtgcacagcgcccagctcccgggtctctgtcggacctgcgactcccggcgcctttctggtgccctccacgccctccacgggcaggggcggagctgaggggcccacacagctccctctgccccaaacggggcagagaatgagtaggtgcctgcagccaggggcgcgcccatcctttcgcacacaacaggctcctgttctctaggcagtgattaagtgagaaaaagagaagcctggcttgggggtgagtctggcgctgggtgaatgtgaatcgccgacacggtctcctgcagggctgcggcgtcctggcccgtggctgtcattctgtcccggtgcttcacccccggccggtgtgaagccagtgtgaatccatggcccgcgcggacacacccgccaagcaggcacaggagcaaggggctctagctgcgtccactccccagggttaaaaattaactgtccggccttgctggcatctctgttgacaacgcgatcattcctgctgggagcgagtgcgccacagagattaactctgcctctccagtcaggccgcctgggttccactcctaagccttaccctctttaaggctcgttcttcataggtcagatggatctcagtcgtcctgaccgcatagggttgctcaggcatagaaggcactgggcacctggtgtgggcaagttgtgcctgctcagtaaatattaactaccgactcacaggacatgcctctctttttgctaccctcgcacgtttcttttctcgtttccttctccattgtcactgacccagggttggctgatataagtgaaaaacaccaagggtgccgtctgttatctaagtcatgcaaatgctttaaaattatatgtctgtgtatgtatgaatatatgtatcaggctctgggcacatagaggtgaaatatcatgtaagcaagcacttgtataattttcttcagataacaagcttgaaaacacagcctctacttgtttccttcccttccctgtctccctttctctaccagagctttctggaccatctccaaataaactacttgctctcaaatcccagtgtcagagtctgattctaagtgaatctagagtgctggcaacccagaatccttttccaggattcaggatggaatcttacaggagatacacagtcctataaaaagttagaataataacgcagcatcaatttgtgcttgatcattaagctaataatgcctcctttctccaccagccccatgtttctgatactgtgatgtgtgatgttgtagttgtgaaatgtaatattgtgatgtggcagacagattataagagttgaatgcaccaggagatttcctgtggcattataagagttgaatgcaccaggagatttcccgtgacataagtaattctcaggccctatgaagtgcaggctttaaaaaaatctggttcagcagccaaaagtcatcaaaaattaatgctagtattttctctctcagagaatgctaatgggaacatgttctaaagtccacttttctttccttccttgttttctcagctttttgagagtgccacattctctctttttgccctgacatctcccagcttcccaaacattctgactcagtcttttcttctctcccaacagatgctcctgctagctcttagttaggtaaatcaacttagcctctctatatgcattaattctctctcagttcccaaactctccctaataaagaagaacttgagagttgactcagctgtcccccagtataaagtggtgggcatgagggagagaaatgtgaattactgatacataattttccccctattaaactttattccttggaacatctttgtgaattctgcaaattcacaaagatattcatagtcctatattcatttgaattatccaaagctccttccagacccagttgacccatcttttctttccttttctcactggagtgggcataatttcctgccatttcccactgtgctgccgccaattctggctgtgtccattagtgtccctcttgacaaacttggatttgaaaaatgggcaactaaatcttcatttattagacgtgtttttcttttactaacagctgccatctgttcctctccacctcaatacaactcccccaatccctccagcatcctttttggacattttcattccagttcctctttattcatgtgcacattcaattgccagacagtttttgaaagagtagaaataagaagtaacagaaaatagaaataataataaaatactacccccaaaataaaagagacatgggaagagtttcttttttcaaaagggaacacataaacaacacatgaaaggttggaaaataacaaagaaaataattttttaaaaaaagatgtagacgcaggaaggacaattatggaatggctggaaagattaataataaccaaatagcttgagggttgcctgcagcagagatgaagagaataaatcagaatagaaaaaaggtttgcctgattctattttacagacagtctcttaaaatgtatgtgtcattcaaatttgttttgatgtgtcagtcatctccagcattcatcctgggctttggatgctacttagttgcacgactggatgtgttctaagatctgccatgcaggttatattctgatttacttgcttacagtgagctcctatttggaacatagttctgaatgccaaagaaaaccaaagacagaacacttccagctcaatttccatctataaagtggtcaaagaaaactccagtccttgaacttgtgttctagtcttttatgcactgtttagaggttctgcaggggctttatgcctgccctctgtgagagatgaagcatgttaccggctcctgatgaatggacatttaagatccaaaatgtattgaagtcgagttgtcatcacgtttttcatttgcccaagtcctatatccaaaaaaaaatgatgtttttcatcatttcatatagatgaaaaacaacattaccagcccctgtttcaaaggcaaaatgcattctgcattgtatatgagttgggtaatgtcaagtgtctgtgattgcagcgtgggagttgttttggtctgttttattttgacttaagtcaggaaacaataagtatgtttgtcattttccaaacaatatggtccaaaaccacttgtggctggtgttctttcatctccacggggcattccacccaacaatcaccatctgccagggacgcctatgaatgtcaaagttctgctaggtttctctgaagcctgcttctgctttcagcagctttgaataagctacagggccacaatttacttctattgtcatttcttcagggagatagagagaaatacatctgccactttagacaagaagcccatgggaagagtacacacacaatcagaacagccagagcaggattattcaattcagctgcaatcagaaatgggggaataagacagagaagaaaagccccatcttgttatgtgtaatgctcatttctgagccagtgtttgaagacagatcatgctttgtgagaaaaacatattttttcatcagataggatgtaatcaaccaagaattaatcattagtgagccattaaataattaattgtaaattgtaactaatttctgattattaaaatgactttttttttatacctgggctcctataattccccattttaaatagttaccaagctacgccccgataagataaagacaaaaaagttgcaataagttagctttggctatgtaacaaaccattaagacataatagattaccacaaaaagtatttattagttcactataatctgggtcaggcatttaggatgagttccgctaggcggatcttctgcttgtcttgcctggggttcctcacgcagaggcaatcagctgatggtgtcagtaggagccgattggtcttgaacggcctcactcacatttctggttttaatgctggctgctgtctgggaggtgcaagggattgggccctgtatatctccaacagagtagcccaagattgttcacatgctggtggtcaacagtgttccaagatgcagcaagacagaacaagccccagtgcagaaacatttttcaagcatctgcttatagcatgtttactatattccactggcaaaagcaagtcacttggccaggtctagggccagtatgggcaggaaatcacaagggggtgaacactgggaggggggtataaatcaaggacgttactgcaacaacctaccacagacgtatccttgaaaatgcttttatccgtatcaccagaccaaaactctagggactttgaatcatgtaagcatgtgccaaaatggatctcagctatcttcaaatccttctttggacaacttaaattcagaaaggtgacttttttgggcccaaagtcacatgactaactcaatactacattaattatgaaggtattggcaagcatctggaatcactgatatagtagtttcacttaatttttaggataggaaaatttatttataaggggaaaatctatcaggactaaagagtctagaaaatattttcagaaagaaaagacagagctcaggtgggcaggtaaacaagcagatgtaatgagggaaaaccaactgaagctcaaggtgttatgtttttcttatattattttcagattcataaggcagtacttctcaaacttcaatgtgcacatgaactgcctttccagggagaactgtcctactgcaaaaggtgtatgcccaggagacacttagctctcatccatgttgttcccagaaatcatatagaactcataggacatactctgaaacctgaattcctcctcctacagtgcaccttagggagactcgttcccttggtcgcaagacacatcctcctggaatcagtgtcttcttttcataactgcagttatccactgcagcagagaagagctgaattctcatgtctcccctccctagccagcccacttgatctaaaagtgttctgtacccaggtcaagttcctcaggcagcaccaatgtgaaagtgaggaagtgagacaggaaagggaagaaacaccataaagtgtgtgttttcaaggaaattaccagtgtgggcaactgggactcaggcttgctgagcacctctgggaaactgtggagaacatgactcagtcatccacccaatgggaagaaagttgggtgtttatccacaaactccctgtcagagaccgctggagggtgctcggggaggattagttctccagcacatcactcttccttaggcacacagctagtgagtcagagaaaagccttcaggcagagacagtattttggggtttctaaaagcagcttcaagcttgtacaggagaatgcagaaggaatatgggaaaggctagagtccttctgccttaaccatcgccggagtactaactagaaagtcaggactagcttaaatgtataatggttgtgactaaaaccaaggcaagcacatgaaaagcaacacattagtaaaacaagcaaaatgttaggcatcaaacagccctgtcggttatttctgccttttcccccttctgttgactggttgggttatgttgttgttgttatgccaaccaataatgtctcagctgccttaaataaagtatttgttttcaacattattcacccaagttactcaacaggaaagcaaagattttttccttgctttccattaggaagcaatattagttagatctggatttcattctgtccctgtcgtctctcaaaactgtgaccttggccaagttatcctccctcaacttcagtttccttatctgttaaaagacaatagcaattctgaccacataggattgcagtgacagaagtatgtaagcagcccatccatgaaaggcacacaaatgttgtcctccttcttccccactctccaatactctcctcactgctgaggattaaattcaattctacttaatcaatttatgttgaagttttactgtgtgtagactctgtcttggattacatagcaagtatagagctaataatcctttctttctaatagctttccattttggggaaagacaggcatataaagctctaacaaaatcaggtaatgataagtacttctttcaatgtgaagagcatcatgctctgatcctacagggagaaacaaattatcctctattttcttgtaatttacataacagtagttgattccataattcactctcaactgctagagtctgcaagattcccaccaactgccatcttcagcagaattgtattacacatgaaaaaacctttgactaacctctaattgattccgacattccaagaactattaaaaagagttgaaaataatctagaaactgctgacttgtatcaggcatagatttattcagacaaaacagagagacagaaggattttgaagtgagatggttttgtcaattgggcataacaaaggaagaaaaataaaaattatcgttcatgctttgaaaatctctcttgtgatgtacctctctgctacagtacctggcatttagaggtgtttaaccaatgttagggaagaaaactaacactggttaaacacctctaaatgccaagtactataacagagtactcattgatcattttattcaatcttatctactcttcaaagcccacaaaagaaacctgttgatcaagcaaagcttatcacacttcctgcaataagagagaacattgtcttaatggagaatggttttagggcctgagctgggtgatttcgaagttggtcttgcaaggcagggcacttgttgggactggaaaagtttatgaaaagtttctttgggttggtaagcatatggaggtaagggtcttgaaaggagtattgatgagtaagtcatcaatcttgataagtaagctgtttcattggtgttatgggataaactgtgcccctctaaaattcataggttgaaggcccaaccccccttcctcagaatgagactgtatttggagataggccttcaagggggtaattaaggttaaacaatgtcatatggttgagccctaatccaatatgacttatgtcttagttcatttgtgctgctataacaaaatgccattgactgaataatttatgaagaacagaaatttatttctcacagttctggaggctggtaggtctaagatcaaggccaaggccagcagttatggggtctgtcaggagcccagtctctccttccaagatggcaccttgttgctgcatctaccacagggaaggaacactgtgtcctcacatggtagaagtgatggaaggacaagaaaggtgaactctctctgatgcttcttttataagggcattaatttattcatggaagtggcaccttcatgacttaatcactttccaaaaggccccagttcttttttgttttgttttgttttgtttttcttgagatggagttcactctgtcacccaggctggagtccaatggcgtgatctcggcttactacaatctccacctcctgggttcaagtgattctcctgcctcactctcccagagtagctgggattacaggtgcatgccaccacgcctggctaatttttgtattattagtagagatggggtttcactatgttggccaggctggtgtcaaactcctaaccttaggtgatccgcccacctcagccttccaaaatgctgggattacaggcgtgagtcaccgcacccagccaaggccccacttcttaataccaccataatgggaagtaagttacaacacatgaattctgagggacattcagaccatagcaaatagtgtccttataagaagaggagattaggacacagacgcacacagagggatgaccatgtgaggaaacacagggagaagacagccatctgcaagccaaggagaggtgcctcagaggaaacaaaacatgccaacaccttgatctcggacttccagcctccagaactgtgggcaaataaatttctgttatttatagccacctgttctcacagccctagcaaactaatataatcggttcacagtcatctttttggtacttccagaaacaggagattaagtaacatacccaagattacaaagctattaatgtggagccagggttctaacttcagtctactgaactacaaaaccaagttctgcatattttaaactttcctctgaagcagaaacaaattataaatagggactaaatagaaagtaactaaagctttgttatatgtttcttcaattgctcagttttccatgggcagcacagggcactcattgctgtttcttttctacagcctccagcctaggacagcatttttgtttataagatataaaagccagccagtgttttatccaggtgagctgacactcttgtgtcccacccactgtcctcaggcctgaccatttctgggagcagagattctgtgatttccaactgccaatacctgcaactcttcatcttaggcagttcccacttggccctggttcagggcagattggaagttctgagtagtgaatgctccccaccagagaagccctcaaccaatgattgatgggagttggtggacaaataccccagttccctcctccctcacgtgggatgactctgagacatgttttctgtactattcccagaattccccaatgggattgacacctagttgtggacagtagtaacaagcctgataacataccttgtattggctgccttttctccccattgttgctttttgggattgcctcctagataaactatactcaagtctttgtcttggggtcttctggagaagctcaaatgataccaggctataaccactggctccaatctgacagtcacctcccatctccaacacctctgtatggatctctaggtttcttaagcaagaggccactttctttaacatgacctggaagagctggcatgatctggcacctacctacctattcttatcagggttcttaggtttaacaacagaagtagaatctgggtaactaatgcagaaaatgaatttattacaagggcatctctcacagaatcagattagcaagatgggaaccaggctgatttagagacgagtaaccaaggccctaccataagaaccatcgacttaggacactcctgcagaccctagcccaccttggtcctgatcaccctcttcctgctgccagattccacaacccagatactccccctactgctgaatgttcagctatcagtagcccccatggaactctctaaccagtatgtaccctcctggccctcccgaaagacttacagcctgagaaggagctgtgggcttgatatgcttaaaaagcatgctcccacagtgcatggagaaaggtctcttcccctacttcagcatctgcagaaggaaatggggatgtcccaaataatcagggtgctcaaatactgggttgccagaagacagaccccctactgcctcacagccccctcctcatcctgaagtccagccctaccaggctttgtgcagtgtcgcgaggccaccatgcttctccttgccacacagtgtgcatagaaggctcccctcttctgcccagtcaaactcctcttggctgcagaattcaggtcagccttcctcgtggaagatttcctgagaccacaaacatgtcagatcccccacaaatgcatgcacaacagctttcctttgagaaattcatctcccttgtaattgcatgtcatttgcctccctcccaagaagtcagctccctgtgggtccaggctgtctccacttttactcaccctgtgtgctcagcaccaagcagaaggtccagcacatattaggtaccaaataaatagctgttgaagagatgaataagtgaatgaacacatttataagcagctcaattttggtttttcacaaatcactacacagtttgtaaatagcaaaagacattgtccttttggcttagaggtgaggcagctcatattttcaatgagaaagatgttctctcatgacagacactaaaataacccaatggggcgtgtgatcaccttgattacatgttcccaaagaaatacttttttaataccaaatatttttcaaagtttttataaagccttccatctactcaatggtaggtcatatctcaattaactattgctacgtaacaaatgtaacaagtgtctccaaagctcagaggataaaaacaacaatcattggttattgtccattcatctagacgtgggctggggtaaactgttctagatgaggctcagcagaaagcgacaatgctccacgtgcctctcatctttcttaactactaatgggctatcccaggcatgttcttctcaagccaccagtgggctagcccaggcatgttattctcaagccaccagtgggatggcccaggcatgttcttttcaagccattagtggtatagcccaggcatgttcttctcaagccaccagtgggctaacccaggtatattcttctcaagccaccagtgggctagcccaagtatgtttttctcaagccaccaggggcctagcccaggcatattcctctcgctgcaatgacagaagcaaaagaggtcaagtggaatcacaggagtcctcttaaggcctaagcttagtcatggcccactatctcttctgcccccatgccattagccaacacaactcaacatgatcaagtccaaagtcaagagtaggttagtacctccacccacaatgggtacagcaaaggatgaaaattcaaagccaacgagcaatctacctcaatattagaggtcaggtgaatgataagaagcatttagagaagcaaacagccaaatggcaatcaagccctccatcagcgtgtatgttgtatgcctttgaaaagctgtcagagacagtacttgtcaaaactgtcaaagtcatcaaaagcaagaaaagtctgaaaattgtcacagccaagaagaacctaaggaactatgatgaataaaagtaatatggaatcctagatgagattataggtcagaaataagacattagttaaaaactaattaaatctgaataacatatgggctttaataataatatatcaacatcgtgtcattagttgtgagaaatgtaccatactaatggcagatgttaataacaggggaaattgggtaaggagtatatggcgactctgtgctttcaacatttttataaatctgaaactattccaaaataaaaataaaatggttttaacaaacacagcagtcagagatggaatgtggtttatgacagcaagaattattgcttgtctagactcaacaagttcttaaccttattacagtcttacaaatgacggatttgttatctagggaagaaaaagccctcttctgggactctgagacaaaggatttatttgtacccacctgagacgtgctcagagagggactggaggtgcatggagagggctcctgtcagaatcttcaatccgggggaggccagctgcctgggatgtggggctgcctgccctcagtccctatgcagcctccctttgggctccttccagcctcactccactgtgatcttactcttctcagtatatctgtagtcttctcatcctcccccttcttctgtctcctcatctgtgtgaaaagactggatgaattctagacccaactccaagcttctatacgtttgcagtaacacaatgtaaacaggctaacttaaaagtccacagctacaagatcatttatttttcaaaatctaattgaagtcacagctcctttcaaagaaagcactgttcacctcaaagaaggtatcctgagaccacgaacagatcagatccccgacaaatgcatgcacaacagctttcctttgagaaatccatctcccttgtaaatgctgtgtcaatcacattcctcccaagaagtctgctcccggtgggtcggggctatgtcaactttggctcacccctaagtcctcaggacacaggacataagcagatgcattttccgagggcgcccggcctaactgtaagtctcgtgaaggcaggggccaacatgaatacatcctgtatcctccaaagatttagcaaaatgctaggtcctgtgccctaccccgacccccacccgtaaataccaaggaaggaagacgccctctgccccttcccctctcctccctggggcagagcggcgcccggacctgctcgctgccatggcaacgcggcgctccctcccatagacagtgcaccctccacgaagtcaccgagcagctgctaccgctgtgtctccgccagtgccatttctgcttcctcgaattttaaattggccagaataatacaacaaattaaggtatttgctggtttctattaccattttttggtaaatcactttttccctattaatgcatgggaaagagattgccagcaaacacaccattaatttcactgagaaaaagctttaaatgctcagtcatgtttttctaatacaattcagtgcttccaaatttatttactgctgcctcaaaaacaccaagtaaatcatgcttttatacacgcacgcgatgcccatgttgagaagaaatttgctaagcggctgtgtttgttgaatcctgagcctgcctctgcacctagaacaatcccaccatgaaatgaaatgaatgcttgcaaagatttcttacttcctcctttaaagagtggtaggaaaatgaacaaagaggataaaaggaagcaagctcatcatgcattcaccaacgttaaatttccaaacggtagttacaaagcatttttaaatttaagtttcattaaagatttggaaatatattgctttttttctctgacttctcccagaaaagtttttgggatttgggaattttatgtgtaggttttccacaatggagtttccttcccatgtatgtgtgtgtgtattttaatatatatataattatatgttacacataccatatgcaatatataaatattacctaacatatattacataattatatattatgcaattatatatattataaaattatacataattttatatattgtagaattacatataattatagaattatatgcaattttatatatattaaaatacatagacaaacataatttagtacatatttattagcagtggggatatttgtaatgcagataattacctgcagctttaaatgacagttttactgatacactgtatgtttggtgagaaagggtgctatgtatggtaaacggaagaggagaggaggacacaagttcaaagtcgaaaaaggttttggagattatcttccaatctaatgccctattttacttgcctagaagatgaggaccagaggaaaaactgacttggctaacaacacacagtcaacttgtggctgagctgtgagttaaatgatgaaactgaagcaaaatcacttggatttctgcatgggagttgtcgacagtcatgaaattacactcaaagactccagtgcattcaactaaatgtcaattagtatctaaactttgccagaacacagcaaacagcagagctaagacatcctgtgggtgatcttccctccctgcagcctggcttgatgaattagagttctttggttttcagaacgtggttgctattttcttctccagctccattagcaggttgggaatggcacactagctttttaattaaaaataataataattaaaataccaaacacagtgttgactaaaaacaaaccattattcttccttaatcacttaggcttagtaatttctctttgtatttggcaaaacttcaaaaggagtaaatcaatgttaaatccaaaatttaatgactcgagggtttttggagaaaaagaaacctagcagtacatcacaataaggcaggagccagaataagtctgggctgttttacaagatgctgtgttctaccactaaaaagagggttatcataaatattattagttatatatgagctaaccccaaaacatcttgattgccttacaagtcaccttttatttttaaacttatgaaaatgttcccaattattcagaagcaagatcattttatatagagttctactgttaaaaacaaacacattctgttttattactgcaaaccctacatgtttctccacaagctttgtctaatatttaaactgaaagacttattacacgtattgaagtgcatataatgttccaaaatagacggtcaccaagtttaaaaacttcgctctctcagctaacacgtgcatatctttaacaattgacaaattacatatgcaggattgttacacaaaatgaaaattaaaaaagaaaaacaattgacaaagcgaagcatatttgcatgtattaactcatttgttttgatcttgtcctatattcctaaaagtcacagaagataatctgttacgtaaatatatggtcagtgtggaaaattcaagaagtatatgaaggaaaaacagaaatctccctctatatcgagcccctctttcatctccacaccccggaggtaatcattattatcattagtttggtatctatctttttataacagaactggccaatagaaatgtaatgtgagccacaactgtgtacataatatgaagtagccacatttctataataaaagcaaaggaaatgagagaaattaaataataatatatttatgtaacatagtatatccaaaatattatcatttcaacatgttatcagtacaaaattataatgagatattttacattgttttcttgtactaagtcttcaaacaccagtgtgtgtttcacacttagagcacaaatcaattcagactgccaagtttcaagtactcagtagccacacagggcagtgactacctatgggacaatacagctctagaccttcctttctatgtgagagagagactgtgagatagtatatcaactaagaattcttggccgggcacagtggctcacacctgtaatcccagcactttgggaggccgaggcgggagtattaagaggtcaggagttcgagaccagcctgaccaacatggcgaaaccccgtctctactaaaaataaaaaaaaattagttgggcatggtggcgcgtgtctttaatcccagctactcaggaggctgaggcaggagaatcccttgaaccagggaggcagatgttgcagaatcagggaggcagaggttgcagtgagccaagatcgcaccactgcactccagcctgggcgacagagtgagacttcatctcaaataaaaatacataaattaaaataaaataaaataaaataaagaattattttgctgccaagaacagaagtaataatcactgaaataataaaggcttcaatcagccaatgtaacaggaagtctacaggtggccaggtctgaggctggaccagcagctaacaatccaggcctcaggatgctctctgcaattgtctcaaccatcccctgtggttgtaagatggttactgcgggtccagagagcacatcttcctactccagcttccaaaggcaggaagcagaagcatagctgagaaaatgagaaagagctctttcttcactcatgaaggggaaaaaaatctttgtcagatgccccctttatatcttttgctcagaacagatcacatggccttcccaggttacaagggaagctgggtaagcagctgtctggctcttttagtctccacagtgagaatcagtcataggagatggggattgaaaatgtttaaaaggtaagcacccaaagaactgacatggatagatctaaaggtagcgctcctgactcaaacagcgttcctacttcagagctggatggactcttccagcccactccttgtgggctgtgctgatcacacttccttcataaagtatgtaaaagaatgtttcagcacatctgcagcacgttggacattattagattctcaaataaccccgtacagtttacactttcatgagtgtcaccttcattttacccagaagttaaataactttctgaggtcacagccaagaagaacctgagtcatgaaccatctattaaacccaggccttctgtctacaaactcactgctttttccattctcagctgcaatccacctgacaagtaaagaatacttcatgaaaattgaaagtataattaaagaatctcaagttgaattttatgacaagtttgaaaacccaatgtaagacccttcccaggataagctctggcatttataaaaatccaaacagccagtctgtgactgaccaccagaaaaacagatcttggggcacttaaatgatctctctactgtgaaccactcagaattgcttttattattggagagaaggtaaaaataatgacagcaatggtggttcataatcttcaaagtatttttatgcccatcatctcgtgtgattaaaaaaaaaaaaacctctgaggttggcagaagtgtgcaaccttatttgataaatggtaactaagactcagaaaagtaaagtaattgggtcaaaatcaaacctgtaggctaggaccctggtcttggatgctaggaactatgagaaagatggatatcagaagtcattagaagctcttctattatcaaaactttctcagtggtctaggcactggttataataataattatagttcacacttacagagcatttattacatgctaagcactgttctgaaccctttacatttgttaacttatttaatttcacgagaatcctataaaattgtgcatcagtgctatgtcttcataacaaactaacgaaacttgcaggtgttcacagcaatatagacagttacttctcattaacagctactaaatgactggttgaggtttggctgatctagggtggactcagcttgggatggctttgagcccaagggttgcgttaaagtttacttctgattcatacaaataataccttgcttgtaaatttcacactcaatggacctcacacacaaatactattttcttagtcctcctgagtgggagttggagtgtcttggtggaaatgggaggattctgacaagtagagaaatgccctgatagccacctctatcaaaaagccaagtggagttgaaaatagggcactggatttgataagaaagagatcactgatgaagctgtcacctgaaatctgggagggacaccatcaagcacagctttctctagggcaacagttctcaaattgtgtcccctgaaccagcagcaccagtgtcacttgggaattggttaggattttctaagaccctgctccagacttacggaatcacaaactctgagagtggggcccagcaatttttgttttaataagctttcctgaggattctgatgctgcttctaaatgtgagcaccactgctctagaagaacaccaagaaactgagctgtgcacagcattcaccattgctgacctgctagaaggttgatggttttcaccgtagcatttgtaatcttggttgtatgcaccctgcctttattttactatatatgcaatatagtctttgaagtccctgtcctaccaagagaatcctaccttattttgggctttggctgctctaaaaatgaaaagttttgaaaagcacaagtcaccctaaattggatcctgggttgttttttgatgggggcataaagaacatcattgggacaattgatcaaatttgaataaggtatagattagataatagtattgtatcaatgttaatttcccaatgttcacaactgaactgtggctatgtaagagaaagtgactgtttctaggaaacacatactgaagttttttaacttcagagagcatactgtttgcaactttcaaacagttcagaaaaaaatgattttgcatatgtcgtatgtgtagaaaaagaatgataaagcaaatgtggtaaaatgttatatttagaaaatctgaatgaagagtatgtaggaattctaaatactcttttcccaatttttgtattatttccaaattaaaagtttacaaagaaaaagcaagtagatccaccatgacttgtgctccaaatgtatgcaactgattttgcagaatctcatgcttcatgctctatcctgttttggagcataactttcctccctccaaaggaaacaagagacacctatggaaatgctgatggagcgagggtggtcaccaggcatggagcagcacaggaacacaagcttcttgaggcctcccaacttgataatcttcacagctggaaatgtcccccttccttcagaatttctctgacattattgtctgtcctgggatattattgctcatttgttagtactaagaagtagtttaagagagcagtctctggggccacttcatgtatttatggcttcaaacagccagggttcaaattctgcctcatccactttctacctgtgtgacctcaggcaagcccctgtgtcctcatctgtaaaatagggatgataatagtaacaaggattaaataagtgtaaagggctaagaaccgtgctagcacatggaagttattcagtaagtcttcactgtgctattatttccatacatttcttccttctaagtcactgcatatatatatatatatatatatatatggcttcaaatctagatagttgtgtattcatagtatgttcacaacatgttcaattcatctggcccattctctcacttcacacctgaagaagcagagacccagaaaggttaaataacttgcccaagtaacacagcttgtcagtgttacttaccagctcaagtcacttgtgcctggaatcatttctcccagcatactctccagattggggatctgaaagagcagtggagtgggcaatctacttttccagagaaggtctttatatagaaaacagttttgcctggagggagccagaaacctcctgatgtaggaataacgcctctcactagagtcatcagagtcactggaatgagaaattaccgggtaccacaggcacactgaattgtaatttatttttcaaatgtgtggtaagttgaggacactggaaatgagcatggtacaatgagaatcagaaaacagtgggttaaaatttaccaattaacttgggtatgccacataattcccacaagccgcattctctgcatccacaaagtgcagttagtggtgcttctctctcagtgtggtgacagcgatcagagcggattcttacgggggggcaatgagtccagggccacggatggccaaaaaatgttctttgcttcaaaaaaggtgatggctgactttggggcagagaaactggtggtaaagttaaggctggggagggccaataggaaggggccatgaggggtggagaacaacacctggaagaaaatgttcctgctctgagagaagtagaagacctggaaccacaggaccagtacttctcacccacacatctattgtatgggcctgggatggaaatctgcgccaccaactgaatcttcaagcaagcacataaaatagtggtatttcatttctaattacacattctgtcagtcatgttgggtttcccctgcaattaactggctctttacaaacgcattagcatatacagccaaaggcattggtttcagactgaggcaaatctggtgtaaaaccggcaactcagaaattgtgtgactttgggcaagttactcagagtttatgaagttcaatttcttcattcgtagaatggtggacaattattcagttactattgctgtgtagcaaattaccccagagcctagagaagaaaggaaaccacagttttttggctcactattttgtggttcaggaatttgggaagggcttgcggttcccacttgggatgccatatacttgcagtcagacggcagcggagattgggggggttgtctgaagactcaacagggctggatgtccaagatgtcccatcacatggctacaggctgggagcccagctgaggatcaaccataggaccaaagctcagcctctccaggaccatagcctcagggggctcagacttctttacaggctgactggcttgccctaggccaaaacacaagatgtccttttctgacgtattcttgtaagtcagacagcatcacagcatcactttgtgtgtgtgtgtgtgtgtgtgtgtgtgtgtgtgttccttgtctagtttttatttgtttgcttgtgggctcttttatttatttcagtaggttttggggaaacaggtggtgtttgtttacatgaagaagttctttaatggtgatttctgagatttggcacacccatcacccgagcattgtacactgtccccagtgtgtagtcttttatcccttgccccctcccatccttccccctaagtcccccaaagtccattgtatcatttgtatgcctttgtgtcctcatagcttagctcccacttataagtgagaacatacgatgtttgatgttccattcctgagttgctttacttagaataatggtctccagtcccatctggattgctgcaaatgccattatttttttcctttttctggctgagtagtagtccatggtgtgtgtgtgtgtgtgtgtgtgtgtgtgtgtgtgtatcatattttctttatccacacattgattgatgggcatttgggctggttccatatttttgcaattttgaattgtgtggctcatcacagcatcacctatttcatgataaatcagtggttgaatcagtcacatgctcatccaggtcaaagagaggaacacaggttctacctcttgatgagaagaatatcaaagaacttacagatatgttttaacactgtcacaattgtaataccactttataatattgttgaaagaattagatatataatcattgtaaagtattttgcatttggtgctattgttaagatttttatatttgcatatagcagggaaacaggttgctgcctctgagctggaaagatgcaggttttaagagacaaacacaggtatacaccatcctttctttaagccacagctttataaaaacctagtcactcaaacccaggctagcaactagttgaatgccattgatttcttagaggaattaaccaaataccttctctgggtccctaagatgcattgatctcctgctttcctccccagcactgtgcgaatgtcactgaatgatgggaggctgtttaaatgggtagaaatattgattttcttttctacctttttgaaagttctttgcttaccaggtgctgagcaaacatcaggcaaacggcagtccacatagaaatagatgatgtgaggagcaacaatggcagttctggcttctgaatgtgaagctggttaagcagcaggtgcccccactacacactgtggttttagattcaaaaactacacatcattgttcacacttcgtcatttgctaattgataatacagctcgcccctgtggcactaagtagcatagtggaaaatatttccaaccaatccatggaaacagctccatccgtgtctgaagagggtcgactgaaagctgagatgaactgagggccagtgacggggtaatgaggtgcatttcggaggctggggtctgcatcctaggtgtccatgtgcaaaattggttatacccttggaaatgacaacaatgttctgtcttagtctgtgtcagagatgacagataaacacaggttaagaaatttctgggtttctttgatatagaggacatccaagaaaccatgcatcaacattaggttgctattgacacccaaggaaactgatgtgtggttaacttctccgaaagaaaaagccaggggttccctcagggagccaaagggcagcagattggaaatcactcgcaattcacaccattggaaggaaaccaatgatggaggatggagaagagccctgtttccaatatgtgcttcctaaaggatacagtcccagagaacttgcctcaaagaacaacaaaggagaatccccagagagtgacactttttcatgattttgtcagatactctgaatttaagtagattactgctttcaacagaatatgacgaaaaccacagtggggcattcttgggcttgcttttcagtttttgcgatgttcttagggaaaaggtcttactgggtcaggtttgccaggctctgcccttggagcacattttcagcacttggttggaagaagattcatttaaccctcagctgtagatgagaacaggatgcagcaaatttactgcaaaccagaaaataaaattggcttttctatccaagaaggaaataaagaaaactctgccttatcttactttataaagataattcttttgttttccctgaaataaataataatcatttaaaagcattgggagaggtgtgcagtgactcaggcccgtatcacaacattttgggagtccgatgcaggaggatcacttgagctcaggagttggagactagcctgggcagtatagggagacctgactctttaaaaaaaatgtttttttaattagccaggtatggtggtgcatgcctgtagtccctgctactcaggaggctgaggcaggagaatttcttgagcctgggaggttgaagctgcagtgagctgtgatcatgccactgtattccagcctgggtgacaaagcaaaaacccatctcaaaaaaaaaaaaaagcattaggagaagagaaagagggaaataaggtctaaatgtcccctttctgcatacaatgtgcctgggttcaggtcagatcaggcaggtactggaacttgggttcaggtcaggcaggccctggaacttgggccagttgctcttacctgtccctgaactcaagcacttccacacctgcattccctccagactcaggttctttcttctgagaagaaaccttacattttttttgggggggggggttgtgtttttgttttttgttttttgtttttttgagacggagtctcactctgtctcccaggctggagtgcagtggttccatgtcagatcactgcaacctccgcctcccaggttcaagcagttctcctgcctcagtctcctgagtagctgggattacaggtgggcaccaccaagcctgtctactttttgtatttttagtagagatggggtttcatcatgttagtcagactggtcttgaactcctgaccttttgatccacccatgtcggcctcccaaagtgctgagattaccagtgtgagccaccgtgcccagctaaccttatgtttttaaaattgttgttgttggttttgttttcaagtgaactttttgcctgttctgtcaggatcatttcaggagagtagcaaccctaaagaaaactctctttttctttgacataaaacttatttttaaaaaattaaataaatacttagtgagttcctactttgcatctggcacttccgggaactcagaaacagagtgagagaggggtcattcccagggagagggatggtactaggagatgagacaggactgggaccttcctagagctctgggtgctattgggagggcaaacaaatacatgtcattcctggaatgattaggagacactggcaattcaaagggaagacaatctcaacacactagtgcgatgggtgagtccaaattgatagcagaacttccagcaaatcgaccctccttaaaattcaagatagaactcttagaaaggatataggaatgttcacatagcatcttgtttttgaagtgattttgtggcctcatcaaggaatcccgtctagttttcattaagaacagcacacatttttagggagatttattcaacaattactataacaagaccctcccctagaaagcttcttagggatacacagcacttttcagaccccatacaacagttccataaaagtgatcaaatttcacattgtgaaacgagacacgatgcagctttttaaaatgctgacgaggcatgaacaacctggtggctttcatttgctttttgacctgagcatgttttgaagtggaggagacaagtgaacaaagtgaacagaaatcagtgaactccatcagagaaccacggtaggcttgttcacaagctgctgtgagccaccacgtcctgggtttctttgttttgcagcaacagtagctggaacacaaacattgagctcatgatccgtcgacatttcctcattggctttggccatttagcattgcaggcccagcccatgttgatttttttattcctttacaattaaaatgttttggttgtttttgttgttgttgtttctgcttgaaggcttctggaattttgtctctatcactgcaatttaaatattccctggaatatggctaaatacagatctcatgttattaatcttgcctagagtgaagtgagcctttcattctctacactgaagtgttttgcttcgtggcttttccaacggttctgtttatttgtttgtttgttttccaggaatattgttaggaatattcccaagctgaggagctggtacacactgataaatctggaactgcccagctcccctgtcattgctgccctcggtctaaggaccagcaatggaaaagagtagagtggcctcctaactatgcatagactatgggctcagtttactgtagattacagtgaacactagcaatggacatgtcataagttaatgctttgaccttcggattttaggacctaagactcaacatttgccttttataacatccatgcaacccacccctgcctgttatgtgacgcattccccctctcaggcctaagtttatagctctctggctataaattcctaagcatggggtctaccccaaatgctggcatcactaagaacaaatgggacaagaaaacccaccctttacttctacctcctgaggctcctcagtaaggagatattgaagcttttagagtaaacacacaggcggcatggaggaagagtcatgcaggtccccatgaaaagatatctgacttgagatcactcccatttgatagcagtagcatttgctgttgagaaggcattcagaagtattcccatcccccaaactaactagctttattgttgaatctgtttctctgctctgtgtcctacacgcctataattttccccttttgacattttaatctctttctggtaaaactgctaaaattcacctgtcattaccagtccatttctgcattgtgaattctgctctttgctgctttcaaaccagatttaatttgggttttgtgctgggcatcctcttcttgtctctatgattcttcaatttaccttttgttcctttttaccttttgtatcttttgtttaaaaaggtaaaattcttcaattttactgcttatcttgtgtttttttcctctccgtcttacggatttgggctcctattttgttacaatcttgatgtacatcctaattaatacaccaaggaatttcttctggttcttacgcttagttattttgcagtgcagtgtttttccctgaatcttcagcagaatgttcccctcccctgttccttgcatttttcattccagctctcctatgtgggcttcttttttctggcttacttatttttaaatgagataagctttacccaaacccagaattcaccaccagactcactgctgggttgtccctgatctgtccattaactaagtcacctcctgagagatagcactggaagagcatagttctttgccaaattcccaatgtttaaaggattggccgggcgcagtggctcatacctgtaatcccagcactttgggagactgaggcaggtggatcactttgaggtcaggagttcgagagcagcctggccaaaatgtctctactaaaaatacaaaaatgagctgggcatggtggtgcatgcctgtaatcccagcaacttgggaggctgaagcagcagaatcacttgaacccaggagacagaggttgcagtgagccaagaccgcaccaccgtactccagcctggaaggcagagcgggactgtctcaaaaataaataaataaaataaaagattgcagggtttaaattgaatctcttcctacccttactgcatatttctctgacattctgaacaaataagtgattaaaaaatgacaatccaccagggttcttatgtttccactcacacacttgaaagttgtgatttatagctcccgaagtgaagcgggccgcccccagtatctacctcctttccataagctgtgtattttggaaatgtatatgtctacgtattattttatgtttaccctttcaaagaaggggtcttgctgaaaaattcccttgttttcaggaaccctgcagagatggaccgtcaaatgtgtttatctattcagccgcactgaatagctacactacttagcagcaattcttttgaattctagcagcagatggactatgagttctgcttttcatggcgtgtcttgagtacttcagtgagaaactcaagagcactaggcaaggagttagtatccagaagcctctttcagaaaaatgattctggcagaaaactgtttttaagagggacagacacaagagtagaataaccacatgtgctctcaaaagtcagacttgtttacagaaaaatctatctccacaactttttttttccacagtgttccatgaacatgctccagggccacctctcaatactcacatgtgcaatatgcatttttgcatctttccaatcctgtccagcctgcttcagctgctgttcagtgagaaccatgtgttcccaaaactgtaagtttagcctggccacaggggtaattgattttctttgatttgtttgtatgaagcactatccagtcccattttacaagaaggagaattggagtagacagtttaaggagtggactacatactgtaaatgttcttgagtgataaggtgtgtgtcacacccagcaccagcaaattacacatacacacacacatacagcaaaattagcatcattcagaagttcttcccacacattccaagaaacattgttgagatggtgttattattccatgcttacttatttagaatgcatttagtgttaagcaatctataacgctcttgtttgtttctttgcttgtttgtttgtttgtgacagagtccttctctgtcacccagactggagtgcagtggcgtaatctccgtgcactgcaccctccaccccactgaggtcaaccaatcctcctacctcagcctccctggtagctgggactacaggcatgtatcaacatgcctggctaatttgtgtattttttgcagagatggggtttcaccatgttgtccaggctggtctcaactcctggactcaagcgctccacctgcctcagccttccaaagtgctgggattacaggcatgagccaccaggcctcgcctataaagctctttaataaacttttttttttttttgagacagggtcgtgctctgttgctcagactggagtacagtggcacgatcatggctcactgcaaccttgacctcctgggctctagtgatccccacctcagcctctcaagcacctgggactataggtgcgcaccaccacacctggctaattgttttctttttcttttcctttttttctttttttttggtagagatagggtcttgctatattgcccaggcttgtcttgaactcctggcttcaaggaatccttccaccttaacctcccaaggtgctgggactacaggcataagccatgcacctagccaacaattattttttatcacaacacagcgaggttcctgctataattatcctgactttacagatgagaaaacaaatgtacagaaagcttaaaaaacttgactaaggccaaacaactagcaagtggtagattcagtatgtgggcctagacagtccttctccagagactgactctcactatccctttattcagcactctctgtattgcatgagaaaaaatacatgttgcatctgtagctgaacttcatacaacgcacaccaactacatttgggagacagattcatttatttacaaattcccagtggccaccaaaacatctgatagttaaaaagcccatcttaaatgtttgtggaaatgaatggaattggatggttttagtagcttcaatttgactcatctaagaaaacagtataacccacatgtagctgtcctcctgagggtggcctctgttttcactatctgccagccatgaaacagggctgcttcatccctgcacagatatcttcagtagaacttgtcagcaaccaacctcacttctccagcatgaatattagctctctctctgcatgcgggaggcagaataatgaccttctcaaagatgcccacattctaagccctagaacttgtgaatatgttatgccacatggcaaggtggggttaaggttttagacgaaatgaaagttgttaataagctggctttgagacagggagattatcctgaattatctgaatggccccaatgtaatcacgagtatccttacaagaggaaggcagaagagaaagtcaaggtgatatcatacaagaaatatttcatccactgttgcgccgttaatgatggagaaatgggatcataagccaaggaatgaggaagcctccagaagctggaaaaggcaaaaaaagaatccctgccccctacaagagcctctagaaggagcacagccctgctgacaccctgcttttagacctctgattcctagaactgtaagagaatgaatttgtgttgttttaagccactaagtcggtggccatctgttacagcagccacagaaaactgcccactgcaggatgaaaagccactttctcctggtatttctcaaaggctaatctaagagcatggattgttctgtatcttccaggagcactattgcaaagtcgattcattacttttttcatttgttccgcatcaccgtgctggggctcattaacgccctgtcatcgggtgctctgtgcgtaagtagaagtgtgttaagaatcaatcgctctgacctttattccctgttggtgttttgtcattcgtgggctgcttggcttgacatatgaattactctccagctgcctggtgctggggaggcacagtcaccagcccccaaatatttcagacatatgccaattgcaatttcaacacacattttttttctaccgtcaccctggaactgttccattggcaatgcatgaaatatgaacaagaggaaataattgacaaggcaccactgttgactaaggggctaacctttgaggaagattaaaaacagatgtccttgaagaagaaagaactgaggaagtgaatcttctctcctcttaactctttagttcattgtcctcatccaaaaattaaactaacacactctgaagaaggtttaaggagatcaggaattttcaagaattcatttgtattctgtagcagacagcttgtttgttccccattgaaaacctacaagaaacaatactgcaacctttgttatagcaaataactggtgggtgtatccctccatgccaaacacatgccaagcataaaaaatgtgcctagaaaaacaaataactttggaaggctcttttcccagtgccttcttacttcctttgtcttagtcctcctttctgtgatggtgcccaacctaagccctggatcctttgctgttgatttcagtagcatttctccctgacttgcaggaaactgcccaaggctttcaaaattaccttttccataaactcctgttccttcctcgaacaatctcaaccagcatctttgcaaaaagctgcctaattaatgacttcatgcacaagtgtgggtaagtgataacacctggatgtgttgcccttcccagaggacttgttttccaaatcttttcaaatagagacataatcagcctggataatgagtgctcaaaactaaagcttaacccttcatggcaggagtgtggtcagtgtgcgtgtgctcaggggaggtgatatgggtcattggaggctttctttgtgcccctcaaatcacatgatttgtactacccaaatgctgcccctgcttccactctgacgatgaaatgatttcatgaatatattgaccattataattatagccagtgacatttatagtatgcttcattattctcaacaagaaaagtttatttcatgtcatcctcaccaataagcctgtgaggtcaagaattccatcatgtccgtgctatacaccagaaatcaacaaactttctgtaaagggccagagagcaaatatttcaggctttgaggccatatggtctctgttgcaattactcaactctacggctgcagtgtgaaagcagccataggcagtgtataaacaaatgggcatagctatgttccaaaaaatttatttacaaaagcagtcagcagactagacttgccaaacccatggtctggatgaagaaagcacaacctggagaatttgaggccctacctcagaacatgcacaaatcagaagcaaaccacctcagaacccaaacccagttctttcttacttgaaattcggtgctctttcactgaaccacacggtttggggcatagtctttagcattcaggagagtcatgactttggatcaaatcaagaatactctccacccacccatctcccccgttttcatcacacacacctgtaaaggagcagctggggctggggtaccatcattagcctgtggccatggaaacagagtcaaggtaactgacccacaggaccaagacacatgaccttgatgctattagctctttccattgaagcttgctggccatatacagcataattgaatgaaactgcagaacttcttcagtcagatccacctgtgccttccagaagcacattaatgaggcccccctccggcacagaatgggaactaggcaatccagacacatccccacccagcatcctccttctggttcactagcagaactggatcatgaatcaacaaaatgaaggaggctttgcaagaacaaagcttttggaacctgtattcctgggtggtgctggagccattcattcctagccaggtgccatgagcactttctctgtgggcgctgttggctcccctttacctctcacccccaaacgcctttccagggaggtgtagtgctgagtgcactggtcagatgtggggacactgactgttcacagctggagtgaagagggacagagacttctcctcgtctccccaccatccttctgttcctcctcccatttgtcctcccaggagctctccttattagactgaggccctttagcctgcctgcaatggaaaacagagccattcacctggcccaggcaggctctttggggtgctacaatgtgcatggccaaagctattcatgtattaaagaggcttagctagctttgcttctttactgcacttacatctcaggagacactcattgagaggaacatgtcattttggccaagaacagcatttagggactttctagcttctctggaaaattgtcctgtcaagtacaccccagtctaaccattcctgccgtaatatctggcatagagcctccatcttttaatatccttttccttaatataatttcctaaatccatctcctaacattgccccaccaccctggaaacaagcatagccctggctgcaatgcacatgttccaaccaatatagaagctgagatttcactttctcggggttctcgttggctgccttggcacctcgctccacaagaaacatctttgatccctccctaattacattgatttatctcacggtataccttgtatccagagctttagatgatagatagcaatttgttaatacttgtcactaagactcaatgactggaactgtggtcagaggcatgcagccatatcctccctcctcaattgatcatctttattcttgcaagatggtccaacctctctaaatgagggcaatcaatactgtgcattcagccataatcgtggcttaacttggtattctttgaaaacttaagctgtgtaatttgcctgtaattgggctttccaaaaagtcatatctcctgctcaaggaagcaattaagccggcacactccctgtctgctgcctgctccctccctcctggcatctgactgccatgggccaagtcttccctccgcagacctctctcctctccagatccctgtttggatctcgacaaccaaagccagcagttggcggcaaagcagatgaactagaatatctgagccccttggagaggcctttttcttccataatctcccacatcacttccatcaatcgcttttgggggtttctcgcttgatgagctgtgtccagctcatcaattcaaacactgagataacacaccgcattgcaaaggcaaaggcagaaaagctagagccccaacagtgaaccctcatgtaaaccatggaccgtgggtgatgacgatgtgtcagtgtcggttcagcacgcgtaacaaatgcacgctgtgctccagcagggatgttgataataatgggaaggcagtgcatgtgaggagacagaggatatgtggaactctctgtgccttcttctcaatttgctgtgaacctaaaactgctgaaagacacatagacgaaagaaagaaagaaagaaagaaagaaagaaagaaagaaagaaagaaagaaagaaagaaagaaagaaagaaagaggagagagaaaaaagaaagaaagaaagaaagaaagaaagaaagaaagaaagaaagaaaggagagagaaaaaagagaaagaaagaaagaaagaaagaaagagaaagaaagaaagaaagaaagaggagagagaaaaaagagaaagaaagaaagagagaaaagagaaagaaagaagaaagaaagaaagaaaggaaagaaagaaagaaagaaagaaagaaagaaagaaagaaagaaagaaagaaagaaaagaaaagaaagagagagagaaaagaaagaaagaaagtctaacaaaaagatgtggagacatgcccctcatgcagatggggacttgtgttgcatttaggacacacttaggaatggactccagctggcttctcttctcacatttgatttgctttgtcttcagttagctaagagcaagaagattaaagtccaggcatctgggcagctttggagtgagatgagcctagcttgaggtgttttggaacaagggaagtcactaccccactgcctttctacattacaaaaacattagcaaaattatagaagtaactgctggcatttcttgagttcacacagtgggccaggtgcttatatgcaccatcacttttgatcctcaccacaaccaaagtacacatgggagtggaggagcagcacagtacgctagagaagtacctagctagactgctggagtgtcgtgtcagtttgcgaaggctctcatatggggggccacagccagggtggcttaaagaacagaaatgtatggaggtaaaagtctcagatgaaggtgtcatcagggttggtttcatcagggccatgagggaaggacctgttccaggctctttccttggcctgtagatggccgtcttttccctgtgtcctcacaccattccctctgttggtaacagtgcctgaatatgatgacaccagttatattggatgagaccccaccctaatggctttaattaatgacctctttaaagacactatcttcaaatgcaacctcattctgaggtactgggggtaaggacttcaacatttgaacttagagggaagagagtccagcccacaacaggcatgacccgtggctctgcccttggctaaccataggaccgttaaccagccacttggtgtcttcatgccttcactcctaacctctcatgtggttgtcggggaaaataactgagataatgtacatgagtactcagggcactgcccagcgcaacagtcagccctcagtaagtgtcagccatcactagggtttatccttattttacaggtgagcaaactgagtcttaaatgggctccacagcttgctggagaccccacagccagagaacaacaggtatagcagggcctgtaactcatgtctgcctgtccccaagaccaagctctcatccacaatcctatgctgcctccttcacaatattacacagaaggcagctgtgtgcctacaaagaagtcaagctatattcccctttctgtgagatgaaggatacacaacccaatccatctcaattcttaccagcttcccaaagcgtgaaacgaaacttcccagccctgcctctaacaccttgtgagaggaagaacttactctgtcactatctggtgcccagctctgtgagcacaccccagaaatgcctcagatcctctaccctccccaggaagataacagtgacaaggatgaccaggccagggcccagaggtaacttctatcttcagccctaatcctgtgtcccatatggatgcgtcctcaagcccatccatgggtgttagagctaaagtgttttaacctaccaagaaaaaaaaaatcctcagactataataaaggcaaggtatcttaccatgcaaattaagaggtttttcataaataaaagattcatgctctttgggtacttttgctacatttttaatacttcctccagcacactggctcactacgctggctggtcatttgaattacctggaaagttttaaacaccgctgaggccagggcccatccctagcaactctcagttccctgctctggtggttggcctgagcacagggcttttgccaccttcccaggtgattgcactgtgcagtcaaggctggggacctctgcttcgcgaggacaccttgttttcttgtagtgatgttaactccagtctctgcctcctccatctccacatgcctttcactctgtgtgtctgtatgtcttcacatggcattctccttgtttctaggccctcttagtataatgacaccagctgtattggattgagaacccatcctaatctagtatgacctcatcttaactaattacacctgtagtgaccctatttccaaataaggtcacattctgaggtactggaggttagcgccttaatatatctttcaggacagcacaatccaacccatcatagtggtaaataaaataattctcagtggcacaagaaataattttacacaatcaaggacatcatagattaataaaccagtatttttagcaacatgttagttttgtgttttatgctccttttcttgctctcacttcaagcaaagacgtccctcaccatctttggagcaggtttcccctttgctcccctttctcctggcccctcccaccccagcacagtcaatgctaattaacagctgtttaattatcagcccagcagggaagtgatcatggcccaggtcctcagagagttatatgcacagttaagttgtcccagatactggaagattgactgtgttatgtgcccatagggagaggcaatgcggcttagtcgaaagttcatagcattgagaatccatcaacctgatgactctgccatgttttaactgttagacaatggcttccaaacctttttttcctcaaccgtaacaataccaaccccacagttttgttgggaagattaaggccaggcgtggtggcttatgcctgtaatcccagcactttgggaggccgaggcgggtggatcacctgaggtcaggaattcgagaccagcttggccaacatggtgaaaccccatctctattaaaacaaaaattagccaggcatggtggcgaatggctgtagtcccagctactcgggaggctgaggcaagagaatcgcttgaacctgggagtcggaggttgcagtaagccaagatggtgccactgcactacagcctgggtgacagagcaagacttcatctaaaaaaaaaaaaaaaaaattaatgtagtaaaagtaccttgttaagtatacaatcatatgcaaatgcacagggatgttttctgcttcatcttagcatggtcataactggcacatcatagagagactagaggtgggtaagggatgggtagagttgcttgagcaacatttgtgcacaaatgtcaaattaaggttcaaaagttgaactggaattgtgaaatagccatctgttcattttaaagaaaatattaactagtaccaattctatgaatctattccaaaaaatcaaggagactcctctctaacttattctacaaagccagcatcaccatgataccaaaatctggtgaagacacagtgaaaaatgaaaactacaggccaatatccctgatgaacatagatgtaaaaattctcaacaaaatactagcaaaccaaatccagcagcacatcaaaaagtcaattcaccacaattaaaaaggctttattcctaggatgcagttagttcaacatatgcaaatcaatatatgtgatcatcacataaagagaatgaaaaacaaaaaccatattatcctctcaataaatgcagaaaaaacttttaataaaatccatcatgccttcaagaaaaaaaccctcaacaaactaggcattgaagaaacatacctcaaaataataataacagccagctatgacaaacccatagtcagcatcatactgaatgggcaaaactggaaggattccccttgaggacagaaacaagacaaagatgcctactctcaccacccctattcaacatagtactggaagtcccagccacaggaatcaggcaagagaatgaaataaaaggcatccaggaaggaaaagaggaagtcaacttatatctcttcatttatgatatgattctatacctagaaaaccctaaagactcaaccaaaaggctcctagaactaataaaaaaagcttcagtaacatttgggttacaaaatcaacgtgcaaaaatcagtagcatttctacacgccaataacgttcaagctgagagccaaatcaagaacacaatcccacgtataatagctataagaagaataaaatacctaagaatacatttaacgaaagaggtaaaagatctctacaaggagaactacaaaacactgctgaaaaaagtcatagatgacacaaacaagtgggaaagcagtctatgctcatggattggaagaatcagtatcattaaaatggtcatactgcccaaagcaatctacagattcaacgcttttcctaccaaactaccaatgttatttttcatagaattagaagaaacaattctaaaattctataaaaccaaaaagagcccgaatagccaaagcaatcctaagcaaaaagaacaaagctggaggcattgcattacccaatgtcatattatattgtaagcctacagtaatcaaagcagcatggtagtggtacaaaaacagacacatagaacaatggaacagaaaagagaactcagaaataaagccacacacctacaaccatctgatcttcaagaaagtctacaaaagtaagcaatgggaaaagggctttttattcaataaatgatgctaggataactgtctagccgtatgcagaagaataaaactgcacccctttctttcaccatatgcaagaatgaactcaatatagattgaagatttgaaagtaagacatcaaacaataaaaactctagaagaaaacctaggaaatgccattccagacataggtcttggtaaagatttcatgatgaagactccaaaagcaatcacaacagaacaagaattgacaggcggacctaattaaggtgcttctgcacagcaaaagaaactatcaacagagtaaacaggcaacctagagaatgggagaaaatatttgcaaactatgcatctgacaaaaatctaatacctagaatctataagaaacttaaacaaatcaacaaaaaaaaaatccctattttaaaatgggcaaaggacatcaacagatacttctcaaaaaacacacaggtggccaacaaacatatgaaaaatactcaatatcactaatcattgcagaaaagcaaatcaaaaaccacagtgagataccatctcacaacagtcagaattgctgattaaaagtcaaaaaataggctggatgcggtggctcatgcctgtaatcccagcactttgggaggccaaggcgggcggatcacgaggtcaggagattgagaccatcctggccaacactgtgaaaccctgtctccaaaaaaaatacaaaaaaaaattagctgggcgtggtggcacacgcctatagtcccagctactcgggtggctgaggcaggagaatcgcttgaacccgggaggtggaggttgcagtgagccaagatcatgccactgcattccagcctggtgacagagcaagactccatcacacaaaaaaaaaaaaaaagtcaaaaaatagtaaatgttggcgaggctgtggagaaaagagaacacttatacgctgttgatgagaaagtaaatcaattcagccactgtgaaaagcattttggagatttctcaaagaacctaaaacaaaattatcattcaatccagcaatactattactagctatatactcaaagaaaaataaatcattctaccaaaaagacacatgcacttttctgttcagtgctacactattcacagttgcaaagacatgaaatcaacctaggtacccatcaaaggtggactggataaagaaaatgtggtacacctcatatacaccatggaatactatgcagccataaagaagaccaaaatcatgtcctttccagcaacttggatgcagatggagttcattatcctaagcaaattaacacctgaacagaaagacaaataccaggagtcctcacttataagtgggaactaaacattaggtacacatgggcataaagatgggaagagtagacaatggggactactagaaaagaggaagagcagggaaaacaaggactgaaaaactgcctattgggtactatgcttactacctggctgatgggatcattcataccctaaacttgagcatcatgccatatatccatgtgccccctgaatctaaaataaagttgaaattacaacaaaatttttttaaatgtttaaaagatattctcatagaaataatagtgatacccagtaacaaagacttctactttcttatgttttttatttgtacaaacgtgtaagccaacggtcctatttgaggaagcgttctaaaactaaatacagaagtgaactatacgttattttctgagaaggggaataattaagttgtatgcatgttattcgtatcacatctaaatggtaataaaaggtatagtgtatggaaggctaaaattcagagaaggaggaagagagaataagtcagtgaccttttagtaataatgtgaaaatatagtttagacactcggaaatatttctctgacattaagggctttatcatacatggaattgtaacactgcagtctttcccagaggtcttctaaaatagtttataacccaatctgtccggtcatggtaattttatttataatggaaaacaatctaaatgactaataagagggaaatggataaattgtggtatatgactctggaacatttaggtagccattagtatttaattttacttaaattttaattttaattaaagtatgatagctaagtagcagcatattacaattcttatggtaggatactcagtgaaaaaagaattcacaactttatagtatgattactactctttaaaaattaggtatgaatatgaattaagattgaatgagaacccagaacaataaacatgattaatggggttacatggtatcattgtggggaaaaaaaaaagttttccagttatttgtgtgtaacaagtgaaagcatatattgttaaaggtgttcgtctctttcaaagtgtaactgtggacaagaagataaactgacagactcagaaagcccccttcagtctcaagactcctaaattgctgagttgcaaggaggcagtgcccagagaatgcagcattcctaagcatcactagtttccattaaaacctaatttatggaattaaaaattaatttcatggaaatgaatttgagcagtcttttcattagagcacacttggtctaaatgagtttggagtggttgtaatagccattcctgcactgttatttataaaggtgaaatctgatgtgagtatttttgttcttacgctactgagaaacaacatattgcttagagttttcaaacttccatgtgatagttgctcttgctccccgaagatcctctcagggaagttatttacgacaaggagtcccatagaatgggaatccctcagtgaaagtcaaccaaggcctccgattagtgagtagagcagataaaggcctctcgttgtggaaccaaaatgggaagaggcaatggccaaagtgagacaccttctttcccaagtgcaagaggcactcttgcttccatagtgaaagaagtttgcgagatgggtgtatctgatggctatgtttccaggtggagaactatacatttacttcaacattttaaacattctgttaatgaatatgcacatgtgtgcacgcaaacacacacacacacacacacacacagagagagagctatgggaatatgctgcaaaaatctctgacttcagggaaaataattgaccaaggcccccagctgctgcactctgaaatctgtcactgtgccaacaaggccacactccccccagtgactgcgagcagcaggggaactcaggcaggcccatttctgggagacacagggctcctcaaatttaatccccaacagttttaccaaaccatccttagagtacaggggaatcaaggatgaatttgcccaactttgttcactgttctttacttggggtcagacttacatcacagtttcttgtatttttctctcataaaatacttgcacatttaatcccatcttggcaatggcttcctagaggatatacatgtgtgtgtgcatatatatgtacatatgtgacagtatgacacacacatatatacacacatacacatatatatttatatatatacacacatacatgtgcataagtatatatatatatgtatatgtacctttgaatcataatttatctccatttgatgggcactagttaggtccaaatttttgccgttataaaaatacccatctatcccatttttctaattatttcacatttctttggggagatttttttttaagcttgccacagtgactgtgactgtcctttgttggaatacctccaaagaactcccagagccaatgccacacttaacacttgttttccacatgtatagattttctggtgtggcttcaatttctctggtaaatgagcttcaggccttctcatgtcagtgtgcagagtaaagaagtgaggatctagcctttcacaggatcctctgcaaggcagtgcagtaaggaggggaagggttttctgccacgtctgtggtctcttcattcttctcttcctgctgtcattctcgacctgggccctgctgtccttctctcatctggtatccattagagttcttgattacaagcaacagaaatggattctgcttcacttcaaccagagagaagttgtcaggaagatatcgggggctcacaatcaatgggcagctggaggatcagtcttgaaagctccggggctgggttgcaggaacatagtgaggatcttttactagaagagcctggtgagggaacctccaggataaatgggctccaggggatcttggtccttgcttcaccttcccaagattcaaatcctgggaaagagacacccacagaggcacccctaaggcagagggagactctaatgcctgcagcaggcgggcacctagaacttcactccaccaacacagaacctgatggattggaagtaattcccccaaatacactggggagatttgggaagaggaaaaaaaatgttgggctacaaaatataatagtaatatctagcagcacccttttatatatgtgcataatccttgagtttgtacatgttcggagactggccacaactgttgcatgataaattagtctttgtccaagtgaaaacaagtttcctgattaaaacaaagcctagccattgccagaagctgcttgaactaactcagctcctaaattgcatttacatccaagagcttggggttctttctggctgtccaaaattgaaatgttgtcagtgcaaggacacaccatccatcaatttcttctcagaggttcctctctaccttctaggactttgctatggcatttgttggctctccatgctggcctcattgtttgtctgtttgttcttgtcttggggaagttttctttttcagcagattctcaaacgtgatagcactgtcaacaaattaaagactgggaagccatccagaaaaattatacatgctgttttcactctctctcttcctgaatccacatcagtcctctctccttaatagaaatgttccattgttttatttcacttaatgacccctaccacattatcttctttaagaatactttactcagccaggtgcggtggctcatgcctgtaatcccagcactttgggaagccaaggctggtggatcacctgagattgggagttcaagaccagactgaccaacatggagaagccctgtctctactaaaaatacaaaattagctgggtgtggtggcacatgcctgtaatcccagctactcaggagcctgaggaaggagaatcgcttgaacctgggaggccaaggttgcagtgagccaagatcatgccattgccctccggcctgggcaacaagagcgaaactctgtctcaaaaaaaaaaaaaaaagaatacttttctctatctaattcttactttagggaaactcactttgagtcatcaccaaagcctgtctgttcagtgcaaccataagtaaatgctctcataaaataatggtaacgggtcaggcacagtggctcacgcctgtaatcccagctcttttggaggctgaggcaggcagatcacttgagctcgggagttcgagaccagcctgggaaacatagcgagaccccccctaatctctacaaaaaaatacaaaataataataataatggtaaggtgagcatgtatatgagatgaacttgcttttgccaaagaaaaaaatacacctgatatacaaatgaaatttggattcatggaaacaaattccagaagacagaatgttcagattatattcaggtaatatgtcagcattgtcattccaggtaaagatggctttgcagcaggaaggatttgaccgaaaaaagcgaggttacagagacatcaatgagatcgacatcaacatgaacgatcctctttttacaaagcagtggtatctggtgagtgtctttatgtccttttggacatttcccatcttgagactctggataaaagatgaattcctgtatcctcattattcactaggatgttagccagtatccaacccagtgaccctctctgtccccttacatatgtattgattttctgtcaccacctgtgcatctagttctctaatctgctttcttctggaactgctaagtagcccttgtctcctagggtggaggctatgaccaacaactagtggaattctcttcagttctgaaaaagtgcaccagtgtatgactgaagattagcaaaactatataaaagtcaaatcagaggtctgggaagagtaatgcaggggtttcaacagacagagtaacaggggacataatgaagtcacaggcctaaaagaaaggatccaatgactttgcaaggggctagcaagaaagcttggagactaaagtagcaaaaagagcatctattaatgcttcctaaaacaatggcaggaaatcaattccatggggcttaactgatgcaggcctggaggcactaaaacccattttgcctggtgaagtgagcattttgtgggtcaccaacagttcatcatgatccatttggattggccaagctatgtttaaaaagggatcagtgactccaaaccaacctgaactgcagggcatattgacagaaagggagtgactaatttgtaaatgtgaatgaagctgtattttatttaagattaaaaagtgatgaacaagagagagaactaaattacagccttgtggacggctacattacaggaattcatcacaatttcccttctggggcttcagagcttgactctgacttatgctttttggcatggaagtccgaaaatccaatatgggtaattgaatgagtgtacttgtattagttaggataggctaggtttgttgcaataatgaacaaccctcggatcacagtagcttatcaaaagcaaggcttgtttctcacttttgctacacgactaatgcttcataattgctcagaaacgcaggctgaccaacctccatctgagctccattcccacactgctttcataagcccttcagcaaggaaaaggggcaaattgtagaatttttaaaagaaactcttaaagcttctgcctggatgtgaaaaaatggcacatgagatcacatgtcattggccaaaatcagtcatccgccattctaacttcagagtgggtggagaggtgtgtagtcttaacatgtctttagaagaaagagcacagtaaattttttaaagagccccaatgacaatcatacaatgttttagcaatatcataacagccactgatcactgtgggcttttgccagtacaagctctgacttcattattttttttacaatccatcctggagaaaacctacacagtacaaagacacatgaagattgggagtggacatattactgtggaattgctctttgttttcctttctttcttttctgaaatatttttgggggccaggatgaggggccttaggatttatttttctgcattagaacatgcactaaaggtgagccagttttctttaattcagttcaacaaatacttttgaacaagacttagtgtggtggcactgaaattacaaagattaactaggacatgtcatctcctgcaaaagatattgttatttagtaagaagttatattcaaataagaataatccaaaacaatatgctgtaaattcaaaacatgaggtagaaacaaagagctatgaaagtgagcatttaattctaaatcagggagggtttcctgcaatagcagctctcttatggaaaaagtttaaagatagtgatctagttataagatattaggggattgaaactatgtttgcatatttacagaaaacagaaaacacaaagtgtttataccaaaaaaaaaaaaatggagaggaaacactataggtaggttgggagggacacccaaaagtactgtttcatggaagatgtggcctttgagctggtcctgaaatattagatggctatagagtatgtcaagtaaatatgtacatgggtgctttacaacaccaaactaataccattctctgctttgaaattcctgtaccagatcaatactgggcaagctgatggcactcctggccttgatttgaatgtggctgaagcctgggagctgggatacacagggaaaggtgttaccattggaattatggatgatggtgagtattttgaagcctgtgcctcatttggaaataagcgtgcctttgcttgccttttgataaaagttgtattgttttggagatgctaaccagagatggaacagcaagatactgggcatgatggccacactgcactgtgcccagatcttcacctttcttccaatcagtggtcctcaaacttgaggttgcacttaacaaatattttttgaattaataaataataagctaaacaaatgaataaatgaaagctgcctatcactcaaccataatttcttactgcttacactttaccttaaaatgtcctctaaactctttatattcaccatcaatttctctagactcacactatccaatgtagtcaccactagccatatgtgcctatttaactttacattttaattaattaaagttaaataaaatgtaaaattttatttcaattcctcaatcacactagcctcaagttcttgatatccacatggggctagcagctgctgaaattcaattccattttcatcatcacagatagttacattagcgtgactctacatccataaaacagcttttcagtaacaggattggagcttggggaaatttgactttattgctgctttcagaatgaacccttgtaaagtagcctttgataactttttattacagacatcccttacatgttattcaacctgcgtgcctaccaaagacttagcagagcttcattttctatagtttgtgatatgaaaaccaatgggcttgatgaattggcatttttccaactacacacgtccttggccctgccaagattgtggagaattgccgcctgtggtcgtttcactggggatgtgttgttgccctccatcacccatctgggtctgccagcaaaaagctctactgtgcattattgacccaattatatacaaaggctacacagagatgaaacagttgagcctttcccatccgaagatcctcaaagaacagaacactatgttccttaaagtgaggctttgaagcagaaatgacagaggaaaccaagaggagccagcctgcttaaaacctgcgttgtcttgtgtgggctcattaaatatcaacataaaaacaatgcctcaatgttttttgatgtgtgagacatttttaagtggatgtaaaaccttcctccagaggccaagggctctcacaagaagaaaggagccctgcatgagagtgtgtgtgctcagatgtcaggagtttataaatgtttcttcttttctcacacttgttcttgaaaactgttccaaaggggttcaggccagctcacccaggaaaacaatgcatcaggatttggggaaaacctacctaggagatattgtcatgaccatttctaacagcatatcctactgggtatccccagccggggatcagagaagccaccctaaaagtggcactaaagtgccaacagatgtgcattgctctgctcttaggaaacctccaagagtactgtagatgcccatttcagaatactttaactgaaagctctttgactgactcctaaagtcattggctcctgactcatttccacatgcaaaggcaagccctttagaaagtctcagcagaatttctcatttgatgttctttcttcagctgattaatggcctttgggttcccacaaaagtaaactctgccccccaattacaattcctggtttcttcttcattttagtcaattactgctgcagaacaaagaatcccaacattgagtggtttaaaaaacaaccatattattatctctcacggttctgtgggttgctggagttcatctgggcagttctgcaagttccactggagtctatcatgcaggtggagtcagaaggaagttgaccctggagtcaactagaggctccaatgggaggctgaaaaggctcagcctccctccctttccatggagtctgaggacctctcctctcacatgaggcctccagcaaggtagatggatttcttataggtggctcaggactcccaagagtaggccttccaaaagagaagaagcagaagctgccagtcctcttaaaggctagacctggaatgggcaccggtaactctgccacttatgttggatgaatggtcccagggccaatccagattcaagtggaaaggaaataaactctgaatttgtggccatttttaatgcatcacatgctattccatatgataactgaagaaaagtatccaagttcactgttgaatagcaaaatgagcacatttgggacaagggcagctccccacatggtgaggacaaggacagatgctcttgccatgtaattggccatctctgtcctcacagctagaaccgggaaggctggcaacatcagtactgcattctctctcttaacgacctgcacgcatgaatggtatggtgccatgtcccagacattttcttggcaagatattccaaaataaggttaaagacagacacagatgccaaccctgatacctaagggcaaaactaatgtcatattctatcaacattgtctctccacatgttggcctgtgtggcaaatgttcaatcatctgcgtgcagaagtttaaatttgtggacagccagttttaatcactgccctcccatctctggttgcccaactccaaactcagccatcatcccctctgctggatccagtgactcaatggatgctcaataaatatctgctgccttcacgtaggtacaaagcaatgtcatttccacatgctacatatcactaggagaggacctccatggttagctgctgtctaaaggggcagaaattatttcttaagggtctactaggacatttcacctatgtagatattagcaaggaccccatttaatgatgacaacttccgcccttttactgtaatggaattgtttagagttgggaacttgacctggaaaatggaatgtgatcatgacaagatacagggatggacaagagtcatccagcccaagagtaattcagggcagatggctggttctcaagatcacacaagatcagagaaggcatgggtcaaggcccttagccattatcagatggagccaaggaagtgagatggaaggccagcgagctaaggtcagagggagcttcaagctgaagtaagaataaacaactaacagtaaaaacgacgaacatttattgagtaatcactatgtgctagacactgcttagcattttggaaatacaaccacagttattccctaaggttggtattattataatcgccattttacagatgaagaaactgaggtttagggaggcaagaaactgcccaaagtctcacaactaattctaaccaccattcttggtacttgaaacctaatcctttgctctgccttcctggtgagactttatgaatgggagcctcattcaaaatagcattaggagatatacctaatgttaaatgacgagttaatgggtgcagcacaccaacatggcacatgtatacacatgtaattaacctgcacgttgtgcacatgtaccctaaaacttaaagtataaaaaaaaaaaaatgacaccaccaggatgtggaaattctccaggacaaaagacagttttttcaataaattcaaataaataaataaataaaagattcaaacctgaggaccacatagtcacccacacccttctgagagatttagaactctgcatcacatagaaaacagtaggaaggtccagcagggtgactgctccagttacttttgctgcataacagataatcctgtattagtccatcttcacattgctgataaagacatacccagactgggtaatttataaagaaaaagaggtttaatagactcacagttccatgtggctggggaggcctcacgatcatggcgggagatgaaaccgtgtcttacatggcagcaggcaagagagagagtgagagccaggtgaaaggagtttccccttataaaaccatcagatcttgcgagacttattcactaccacgaaaacagtatgggggaacccacccccatgatttaattatcccccaccgggtccccccaacaagatgagatctgggggaggacacagccaaaccatatccaaccccaacacttagcagcttgaagttgctatttatctttaatcatgattttgtggcacaagaatctgggaagagcctggctgggcactgctcactcagtgttgctcatgcagttatgatgttagctgggctgcagtcttctgaaggccccgctgggctgcacatccatgatggtgcactcctatcgctggtggttgttgctggttgccactggagctcagctgggaccgtcaaaaagagtgcccacatattgtgctttactatagtttggtcttgatgtcttactcaccagagtggctataaactctatcctgccccaacaggactccaggggattggctgtagatgtttacaatgtgccttagtccgttcctgatgctgtaacaaaataccttagactaggtcatttataaataacagagatgtatttctcacacttctggaggctgggaaatcacaaattcagtatctgataaaggcttgctctctgcttccaagatggccccttgttgctccatcctgtggaggggacaaacactgcgtcctcccctggcagaaggggtaacaaagggatgaactctctccctcaagcccttttataaaagtacgaaccccattcatgaaggcacagccctcaaaacctaatcacctcctaaaggccccacttcaaaatactattgcaactagggattaagtttcaacatatattttagagggacacaaacactcaaatctcagcatttcaccctgcccgcaagcaccacccccccgaaaatttgtgtccttcacatacaaatacactttttctagcccagtagccccaaaagtcttgatttgttccagcaccaacatcaaagtctaaagcccagagtctcatctaaatatcatctaaatcagagatgggtgaaactcaaggtacgattcatcctgaggcaaattgctctccagctgtgaacttgtaaaatcaaacaagttacgtgtttccaaaatacaatggtgagacaggcataaaacatacattcccattcccaaagggagaaataggaaagaagaaaggagtaacaggtctcaagtaagtccaaaatccaaaaaggcaaacaaattctgaggcttgagagtaaccttttctgactctatgtcccaccttctggacacactggggtgggagctgggcctccaaggctcctaatgaccgctcccccatggcttcactgggcacagctcatgcagcagctctcatggggtggagtctcatgcctgccattctcccacactggaatcacatgttagtgggtctgtagttctggggtctcagggcagtcccacccccacagctccactgggctttgtcttagtgggggttttctatggtagccccaccccatggcagttctctgcctgggccccgaggctctagggttagggttagggttaaagaactggagctcagagccagggttctgacatgctacgcatctcaagtgaactattaacattctacctaggaatgtgcacatggaactccttcctagttcctcgaggtctccaggactgtcaccgcttcctgagaattgggactattgtggattagactttccaagaagcttcaaattgatgataggatactaatgatttatgaaccaaattataaccaagtctttgtcatttctgtgccacatttattatgattggctggtgatcagtcggtacccccataggctgtgagccatagatagttgtacagctcaggttctacgtctaaatcacctgcggttttccaggaccgacactgtgcctggcattcactgctgagaaataaacaaaagcatgaagtataagaatgaatatgagaatattgtaagaattaaacataagccgattaggaagatgtgttcagtacctcccaccttaaaagataatcaaatatacaaaaatataaaagtactatctagttaccaaattactattttccattcttcagtccattattactttttccgaatcatgtttgttgtccttcacagtcgtatcaatcattctctttctcagaccaaagtcggtatctgttctaacttaacacttagtattcctcttaacctaatttaagatcgtttattttaattaggctaaatttatcttgttttaattctaatttccttctggtctcaaattatcttcttgctccagtattttcccttgacagagaagacactactatttattggaacatttttctccttaacagcttccattctcagaacatgaagccatgtttcaaaaattgacttcctgttggaaaatatattctctgggtgtgtctttttttacacttatttagataagttcgtttgatctagctaagtgtgaaaaaagacacacacagagaatatattttaaaatataaatatttaaaatataaattatatttttgatcatttatatttaggtataaattatcaaaatttttcacccaatgagttcacaaaatttaagctatcttaacaaatagaagcaatttaatttcaacacaatatgctgaaaccaagtggatattttttaatgtttcttttcttctgcatatgcacactactccagagatgtggtagatgttaggactaatgatgataagaaatagaatgtattaagtgtttactataagctgaagactttcaatgaattgtctctaatcttgaaaaccgctttgcaaagtaaataatagtcccatttcaaatacatggaaaccaaagctcagacagattatgtcacttggctaaagccacacaagtgttagtgtctgagcccagagtggaactggatccactgatttcaaagcctatgctcatccccaacttcaccccacagcctaaactgaccattttgctggggggatgtttcttggtttgcttttggggatttgtttgttgtttccttttagagacagggtcttgctgtgtctcccaggttagtgtgcagtgatgtccttatttttgtagagacagggtctcactatgttgcccaggctggtcttgaactcttggcctcaagcaatcctcctgcctcagcctcccaaagcaccgggattacaggcgtgagccaccatgcctgaccaaaattgacggtctttgaattaggatccagaacaagggttaacaacatttaaaaatatttgtctttaaatattctgatgcctttccctctgaagacttcgggaggcaagtgggagaagaaggcataatgatttagggaggggactatagtctcccaaactatagaaagcagccatagtgacagcaattgcttcactcatcaaaatcaacagtgaaacctaacacacgtaccgtagattagtgactctcagtccagttactcattgtataaccggaaaaaaaaagaaaaatttcttttcagaaatatgcatcctaatacaagctcttttggggaaggcaaatctctaatggtggcctagccttagtaagcatgcagtgaagatagcagccttgggacagatttaatgatacttctggcttttagatattgcatccccatatagttattaaatgcaccagctgctgggccaagcataccacatgcattcatttctttagtccttacattgttctcacccccagttgatcaaaaaggaaaattatcacagagtccaagcaacttgcctgaagtcttgcaggcagttatcagggtggttgggactcaaatgcctgtctttgactccacagacctacgtttgtaaccattatgctagatggtgtcaagaacctgccctgtttcttggagggttagatgctcaggtgtaactgctgcaaagcttatgtggttttgcaaacccaaatgagagcttttcaattgcccttggagtttcttgatgctttctgaggtccaagggtctgatggaactcagcagtgctcatagtccctgattttacccttggaacgactactgggcaacaagacaggccaccattcaggagaaagcagggctcctgctgagacattcaagcctcaggcttcctggaaagccacattctgaggagacaagcctcagctcccaaccagcaacacctcactggaaaccatttgccctttacctaatggcttttcttgcccagccatgttctcttattatttccatgccagagtacattctcctaatccattgctgtccatgccctgttaaataataatcacttttcctccccagggccggtttcatttcagagaaatgccagttgatgctttaaaaatgtcaagatttctacaaatctcttttagatcagtgctctgatgagccatccatctcactgtcacaaagctgtcttgggcagctgtctctccgctctggcagtgcagcccaccttcacacctccacacagaagggaggtgcaagactgggagctgtgtgatggggcactcacccccatggcaagccttctggcaccagccccataaagagggcactttcttgggcagctttcctgaggacacagtggcaggtattaacctttggttcctgtgttattgttgtcttttcacagggattgactatctccacccggacctggcctccaactatgtaagtacaagccaactttggtggggaaacagatgcatcttaaatgtcctggtgtccctggctattaggaacatgcacatgtctacatgtctatacacatgcatgcaagtacaggagcatgcacacacacacacacacaggagtacagctgctggaacatatgcacgcacacatggaggaacacacacaaacaggaacatacacacacatgcataagcacaaaagatgcacacgtactcataggcacacatgcatgcacacacagacagccacatgggcagccacactggaactgtccatcccattggagccacagctcaggccacaagcaaatggacaaggcatgtggcctggcagcaggcaaaggcagtggctttgagagaagaaagaaacctgacatctgaaagagcagagtgccaagaaagtaggtacagggagggggaagaagagagagacttggcaaggtttaaatcaactctacctgatgatattgaattgaagggtggaaatgagccatttgggttcttgttggacaaaaccaaaggcaaaaagccaaaaactgcagtgactcacattgcagccccagctttatgaaagtaagagcgttatcttttttgattatttgtgtcacttatgaccactccactgactttcccccataacattgagaattactatcccttgacaaacaagcaatgttagcagagaatcaccaaaagccctgctgggctagaaccacacactctaacttttgactcagcagttcacacgctgctttcctgatgaagcccacaagccctttaaacagaatcgatcacttattttaaccccagggagtacaagattcaagcattggtgcgttcacttaaaattatccaaactatttctaagctatacttctgagacctccagatctaggtgtaaaaaatgttgtcttagtcattgaagagactcatatttagagaacaagggcttgcataaaagaaaggatggttacccagcaaaaagtgtttggaggtcaccagtctgggtcatttgtcctggaaggcgagtgtctctacgttgcacaaagaaagggggaatattccatgtgtttcatgcactgggcaacaagaaacaaggcattcaagggatcttataaatctagaagagcataaattgagaggagcatcttttttaatattaggaaaaactattaaatgaatcattggcagaatccagccaatgtggccccagaaagaaatgacagaaattaaaccaaagctatattcccagcaatgataataatccatgtctatggagaagaccattgtaaactgcctgtgccagcggtcctgtgtgtggagtctgaggaaacagcccttctccctgtctcctcatggtgccttccctactgaacatgagtggagctgtctgctggtcttctcatgcacttccttaaagggactgccctggacacagtccttgctgcctctccctgactatggctgactccgctagtgccttcacctttccctgcctcctccataactgcagggccctggagatgtgtcaggcaggggattgagaagtgctgcattgcattttctccaaggctctgatgtatctggggctgttcctcacagagagcaagtgtggcagggatcatggcctccagggtcggtggtcctccctccgagggctgtccccactccaccctctgcagacagaggcattgatattctccacagttccctccatctccaggacccagtgcctcacagggcagccacgtggagttctgctcactttcccaaaccatacttggggaaacaatcatcttgtcacttggaggacttcaaggtggggtggtacccattgggctggagagctgagggcacatggcctgtctcctgtgcatagcataaccccacaaaggcctaagacatggagaccgacctctgcatccttcccttctccctgcctagcccaggcagttcctgtcaggctgctcccaactccagctgccagattcgaaaaagatagtcattcattgggggcaagaatcctctggggttccagtgagctgcaggtacaatgttagtggatggtgtgatccatctgccaaaaccttcatctgaaattggaatgtgaaacctccatattgagccgtgccagctcctctgagatctgcaataccagaatacacctgaagaactcttatcggttctgtgagtctcaagttcttttttcttcttttctttcttaagaacatttttctgattaaaaaataaatgcatgttatctgtcaaaaaatatgaaaaagcataaaacagattcaaaactagccataataccaccattcttattattttgacatatttggggcctttaatttctatgtgtctatttttaatgaaattgagctcttattgcatattcttcccttctgcttgatgtgccataaacatttttatgttattaaatattctccaaaacataattttaagggctacatggcattagctcatgctataatttatttaaacattctgatctccaattgttgaacaattaggttgtttccaatcagtgtttcactgtaagagggagatgagatggcagacagtaacatgggtggactccaagccataccatgctaaggagaactgaaagaactggaaaagcttttcctggaaaaaagaaaacaggcacattgagtatgttttcaaatatttcaaattctcctggtacaatgaggcattccacttgttcagtaatttctcccaagaaaattctcaccaatgggtggtaaccacagaagcaaaattttaactcagtcaaaggaagaactgtctagtgattaagatagtaaattattgggaggccaaggcaggtggatcacgaggtcaggagattgagaccatactggctaacacggtgaaaccccgtctctactaaaaatacaagaaattagccgggcgtggtggcatgtgcctgtagtcccagatactcaggaggctgaggcaggagaatcgcttgaacccaggaggcggaggttgcagtgagctgagattgcaccactgcactccagcctgggcgacagagggagactctgtcttgaaaaataataaataaataaataaataaataaataaataaataaataaataaaaataaaagattagtaaattaatgaaagtaacaaattcttcatacctgaaaatattcaagaggaagtttgatggccactggtgggatgttattgaagagatgacaatgtctatgctgaacttaaactagatgagacctaagaattgaacagaaaatgtgatttctgtgcaaaactgcgcatcttgataactttcattcagagcaaagtctgagtcttcaacttgtatcaaacacttggaagctgacaatgaaattatatatatttacatatggctgtgaaaatgttctgcctctggtatagatgagaaaactgaacacctaactacctcgtgcttgattcctcagcagagggcccaaactggctggtttttaatggcacagtgtctctctcaccctgtgtagagttcagagtggcaacttcggagctactaaccacactaatcttctttatttttaattaaaaattttacactatcattaacacaatgaggacagcaaatagagtagaccagcccaggagagcaatgaaaccagtagacagtgataggctcgaaaattgtttgagcagagaattagcaggcagcttcacacctcgttaagtgacctaatggcttggagggatgagccagcctggtgccccttgagagagaggtacttggtggagtctttgcttgggtttccctagaagcagactctgaagcaagggtttgagtacaagtaggttatttggaagaggattctaggaagcaggggtagaggacagggaatgagtccgggaaggaaaggtagcttgtaaacggggcagttatcaaacaagacagcactgtgggcactgaggcttaatctcactgggcagctctgggagacagcatagaatatgtgagccagagtgatcccccttgggatgtgatgcctcaagaagctggggtatttatgtgacaacttcgtcagtcattggttgagggcttgtcccaaaagatgttcctacctccccacagcctggggaaaagccctgggcagaggtgtgggtacagacagctgcagcttaccagggacatgagggtttcaggctgaagggggatgtagcaacgtctgccccagagatgccttggaaattcattaaaggttaaaataaatagacatgttctatgttgaaaaaactccttgtggttactgatttattttcagtgaggattgaaaactctacccaaggctcctcaaaaaaattactttataatcaaaccaaccaaaatgtttctgaaagcagaattattttcaaagcttggttattctgtatattaagagaggaaacagcatatgctggtagtccagtttattcccattaaactaagaataaaatacttggaaaattgcaaatcaatatataaatgtaagttgttagtgttaatctaattcaaaaaatccacactgagcctgctgagtgttgggagtaaaggataataacggccacttggattattactctattgttctatgattgaatttcatcggagggatccagtcccactggtaaaagttcactattccaaataattaaaatttttctttttctatcccaatagtcatgacacgaaatgagtattagccaagaggctattttagaccaggttaaaattataacctcctttacccatcttcgctataataactgggtattttctctaagtcaatacaatggctgtggattgaacctgctatgtgcaagccccagaggaagagagataaataagacacaggcactctctagagaagtcggcaggtcagtaaagatgcaagcatgtgagacatgactgtcaggtgaggggtaggcagacagggaggttcgttgtctctttactctgagctcccaatccagtgaggattgcaggctgggttcacagtacgggcccaagctcaggggttctgttaggtctatggaacaaagggagacttcttcaagaacatgtggagtgtgacttaggtggcagctttcagggcatggaggtgggtggggtagaacgtctcctgctttgtagctttgctgaagctacaaaggtgaagaaaaggctggtgggtctgtagaatccaaggagagccttcttgctgtgtgctgggttttctcagaagcagaccctgagacaaggatttgaaagcaagtcattcatttgagaggagatcccaggaagcaccagctgggaaggaggaaattgatgccagaaagggagagtggcccagagagcaaattaccccctagggcaatgggagctcaatctccctggggaactctgggaaacagtgtggaccgagtgggcctcagagttacccacaaactcctgtcaaccactgggtgaaggccactacccaggagtagagatgaggtggggagatagaaggattcattctagacaagaaaaatagggccctgcagacagagtcttcagcagagttgcatgtgctgacagttggaaaacagccagcttgcaagggtagggttctgacagttggcagtagtggaaactgagtcaaagctgagatgactcctggctccctacctcatgatgcagccttagaggagcatatcaaacatctttgaaccttaattttttcatccgtgaaatgggcaaaatggatgtcttgtcaggtttgttgcaaggtatccttgagataatatgcgtatcaggcctggcacataatagatgctcaataagcattcatttccttctgtctcagaagagttgaggttacaacgttgcacaatttcgggttgtcctgatggagaagcaggggtgtgcctcaagaaaccagtgcagttgttcattggacctcccagtgagcttagggtcattaaaagaagaaagggcaactgatccaggctaagtataagattgtgagggttgcaaagttaagggcaaaaatcagaggataccaacataaatctcaaaggctttgaaaaacaacatccaagaaaagagaaggtaaaggcagggagaagacccattgctcgtggccagggatgtaatgaaggatgcccccgaggaagcggcatttctgacctgcatcttcttccctgtcacataccttagaactagatgaatattcaaggatagtcataagggagggttaatccctaaggtgggcaaagggattataaggtagcaactaccccaagtgaggttttctccgagccagggaaatctcctggtatttaagccattgcagggtgggacatcaactcctgttctgatggctgggaggatgggccacttcttgcactccgtcttctagcttggaaactgtgagtgatgctctgagcagctccaagatcctgtgctgagaatctgtctagattcatgacacttcatgagcttttccaagaattcttgagtgcagcaaatacagaagtttgcattgactcaactccacatccttccctagaccacagcttctgccatgggactctgtagaatctccctttaaagaggtgaagtgtgtttcctaccccttgactttggattgggccttgtgacatgttttaagcaatagaataatctagaactgacagtgccagtttggagcctaggccttaagaggccttgtgtgctcccaactgcctacccacgcctctgccatcgccattagaagggcattcccaggctctcctgctgtaccctagaggagggtgagagacatggagaagagcttccctgctgccacggcctgaagcaccaccacccacactggcctacagagctgcagtaagaagcagagctgcctagctgagccccaccaaaatcaccaaacctcagccaacccacagaaacaagcaagccagccaagctcagcagagctgcctagctgagcccagcccagagcacctagctgccagctgaactgtggactcgtaagctatctaaacacctgctgttatatgctgctgacatattatggccgtttttgtgtagtaactgttacagctgcccatgctagacccccttctccatcctcctacagtacttgaggtgtaccccagtctggagagaatattggcttctaggcctatcctagacctactgaatcaaaatctttagggacaagcctcatagtgtgtatttcttttagaatattggcttctaggcctatcctagacctactgaatcaaaatctttagggataagcctcatagtgtgtatttcttttgaagcactccaagattctgatggttaacctactcattcattttggcacttcattcatgcattcaatcattcattcattcaacagtgcagtttacctataatgtttgactacatcacagttagatcataagctctttgtaaggaagtgtgtactttgtaagtgttttgtgtccctcttaacacttatcacagtgttaagcaagcacttaatacatatttgttaaattgcattaaatgttaactcaccaatattattgcaagtaataccaggaactaaattatatgatgaccctctatcgacgatgatcagaaactgcagcatgcacaaccctctgtgtaattcctagttctcaaccacctcataggtggatgccaccattgcctccttcatcatgcatgatactaaggaaagagaggaccctggaacctaactgagttcctatggctgcaagcctggagagaatacgattcgagaggtgaataatccacaggcaaataactacaagctatttcttttctttaatgtctagaatccctcaagttgctggaaatgcaattaggttcctagataggagaggacaaattatgttctttggttccgttcaaaatttggaacattatttatgttccagggttgctatttcaccaacagaagtgatcataagagaaaaaggcccacccctacattcctgcacttttccattctttagatgggtcctgacaggtgactgtctctgaagtgggtgcctgctgagagctcagaagagctgccagcacaggaagtaccttgagcttgacagaagtgtgcacattgggccccagggggcatgtggcctccatgataaaagggcgacagcaagaaaccggcacagtactcagccccgaatgactcagatgttatgaagtattgatcacatacattgcttctggcttttaggcctatgaatatttaaataagcacattaatattgcatatgaaactgaggcttaaataacctttgtttcttattgaaaggaagggctggcattttcaatgtgctcttgaatgctggctggatcatgatgagcactttagcaccagatcagactgaatactgagaatggggactttttaaaaatcactttgatagaccgtcagtcaaatgactatcacttaatgcaactcatgtactagaggaaactatttatttttacagaaacatactttgctttaaaaatagggcagaaatgaaaccttgcttaacaaaatgaaactacttgtatggacctaaacttacagctatagctgaaagcaaagaaaatatctggtcattctattatttttaattattcaattgactagtatttgtttcattgaacttagtcagcattcaagaaagccgtattgttcccactgtgcaaaatgctatactaggggcctgaattatgaagtgtgaaaaatccagtccctgaccttggggggttcacatgtaagtatataattacattataatatgcttagtgctaacctggaaataaaacaccacccatataggaatgcaatagctagaaaaagcaagtcagccctaaaaaattagagaaagaaagatacttaaatgcatttaaagaatgcagctcaccacatgggggatgaacttgttttcttgggtcgatacagcatatgaattcatctagaagcttcatcaatacgatactagacaaatgggtaattggatttcatctggagatttgcttccacctagaagcctagacttaaaaagtagcccacatcatttccttaccccaaattccctaaagcccttcgacagattctcatctctttgactaaatttaactggcttaaagaccagggtaatgtcttccaactcttttactcatgagagaatgaaccagcggcctcattccccacagagatcattaagagagacttcataaataaaagactgaattatggatggatggacggatggatggatggatggatggatggatggatggatggatggatggatggatgaatggatggatggatgattggatggatggatggttagatggatggatagatggatggatagttggatggaacggatggatgaaaagatgggaggatgctaatgagactattgggattttattccatttatcactaaacacacctgttcagaaaaagtgtagcaatgtttactgataagccacaagaaagtcatttatgcaaatataagaaaattgaaagattactattctcaactgcctttgttcctttctttgtcttcattatcggtatatacgcactgaattcccaaaatgtgaaatattttactggcttttttatttgggtttctatctcatagaaccaaaaacctttaggtgaccaagccttacaaataattaacttggcaataacccctggctacagctgtggttcaaaatgctgcttctgctgagctgacatccattttcactttgtccctctcctcatgtgcctgtttcccaatcatactgtcttaaagccacagttctgggtgtctaaggcaggcctgaccagatttctgaacccatgtcccccacccaggaggggagtagtgggttgatgccacagcaaaatgggcagtcatccacactgcttgcccatgtcttgttgccaagcaacagagcccaagtgggtgtgtccactagagccacacctacatgggatcattgcctgggcaaatgtggatctgatggagaccaaacgtctgatccatcatccaattacagttttctgaagcagcaacaaagaccaagaaacaatgcccaggcctcaattaagaaggatcagactctgaagccatggagtcttctaaaatatgatagaagataaattttgtggttgtgtcaaagaatcatgagtactataactgtcattttggctagagccccattcttacctttaaaagctcttaatcatttttccttgaagacaaagacttgatggtaggcagaattgtaaaatgcccccctaagatttccaccctctgctgtaagcactctgtatagtccctctcttgagtatggcaggacctgtgaatatgatgagatatcactcttacaattaggttattagattgcattatatggcagagttagagatttttttcagatgtcatcaaggcgcctaatcagttgactttaagctaatcaaaggaaagactatcctgggtgggcctgaactaatcaggtgagccctttaaaaggtaatctacaagtcagagaaggaaggagtcagagagattctaagcagtggaggctttcacctgttggccttgaagatgccactgccataatgtgaacagggccacatggcaaggaatggcggactccctgggagctgaggcctcactcctacaaccacaaacaactgaatgaacttgaaagaggaccccaagccctagatgagacagctccagtgacaccttgatttcagccaggtgagaccttgagcaaaagccccagttaacccacgtccagaaactctgagataaatttgtgttgttttaagccactatgtttgtaataatttgctatacagcaataaaaaaactaatacaaccttcttgattatagtggatatttgagcacaaactgaatgacttgctgtctctctgaattaataaaaatagaccactcctcagtttttactttttcttaatatgtttgcttttatctcaaaaataagtatactctgcctattgccacatggggccctttcataaataataattctgctgcaatgagaggctcagagaaatttagtgaggaagttaagaagagctcttgggccagcctcgctgaattcaaatctcacgtccaactgcttcttaactatgtgccctaggcaagttaatctctctgtgtctcaatttcctcatctgtaaaatgggttaataataatactgatcttaccggtgattgtgataattcaattcagtagtgcacacaaggcccttagaactgcctctggctcataagacaccctcaataagcattcgatgttgttaagtcccctgcccaagattgcacagctagaattcagcagggaagaacacaagcctaaggtggtcagacctcaaagtctgttctcttagcctccccctcccttcctgccttaaggacacatatgaatttgcagaaagcattttttaaatgaaattaaaaggggcaattagtgcgttattctaagttttctttccactttcctgctaacaactagtgtgttattctaagttttctttccactttcttgcttccccagccctccctgtcctgcctcccagaatactttactggtttcccctgggagcacatccttaataaatcacttgcctacaagctttcatcacagggttggctcccaggaatcctgatcttacattagagcggtctggagctttaggcaaagcagaattttccatcctacatggccaaggcggagagaatctctgacatagaaataagattagcttctccaccatggtaaccctgctgctgactcccaacctacgggaaattatttttcacaaagaaagaatctttaattactaaccaataattaaaacctgaagccaagaacaggaagccagactttggctcttagcaatgttccttaacatcaccgggagtattatggtgaggtctgcactttccatgtggcatgcacacaacctctccacaatgagtgctctgctaggcagaagaataagatgtattacagtgtgtaggagatgttttcattaagctatggaaagagatggattatgttttataactcaagcattgccaattttttaaataaggagttcagtgtaagtctaagctattcaaagagcactagttcacagactcccattgaggtactgcaagccaaaaaaaaaatgcgttgtttgatctttatggccctcagtttccccatctataattgtcatccccaacaagattctcattgtctccagaatcaaaagagtataatgattattcatatggctgatatgaacactgggtctttgttgatcaatcaaaaaatagaaattaaatggaacttctgagaatgttcaaggcgttgaagctattctggtatgggtattggaccaccctccctttttttctccacaacaccccacaagcatacacacacatattctttctctatcatgtaaagaatgttccagaacactaggtggaaaggagccagtccctgtgtagaggcctgtgtggtgacagatgggcactgagtcatttgatacagtcagcaccttgcaggaattcttaccaggcactttaccaacaaaaaatatattatctgtgaataaaaccatggccaaggctattaaccacttcgattaatcactcacaagcggtcacaatgatcctatactacatggcagctttattggggagttttgacttgttgcttgcttgattattaataactcgcaaatccatctctcctcccgtggagagttggtagttggctaacgaagtatgagaaccatgtgttgtctcccacctcttctccctgccgtggttctgatatttctccattgatttctgtggaatagcaggagtgttagttcccagaatttgttgagtatttactgtgtgtttggccttgtgttttatatgcatgatcacatttaatgagcgtgttaagccagtgaagtgggtactttcttacccacctgtcatagacgggaaactgaagatcagagaggctagtgatttgccttagctcacacagacagtgagtagcaaaatgtgaagttcaccatctgtcatgctgccttcatttaacctggccccctccagtctcccacatcttaccaaatggcatcgccatggtcacaatgactaaggtgctaaacgttaccatccttgactgctgctcccttctttttcccctcagccaccctatctgccagttctgctaggcaatacacctgcctctctgttcccaccactggcatcctggaccaagccagcatcacttccctcctggaccccacaaaagtttcctgcttccactcttaccctctgcaatgcattctccccaaaacaagcagaaaggtcgttacaaagaacaaagtagtggaagccatatcacttccatgcttaaaaccaacaggtggctctcccccttccctgtgagacttagcctgtttgcctttgtcctgcttactcacgatgaaccagactctacaatccaggattctccctaattaaaggcttggaagactgtcacactagctcttcccacagttgagtccatctcaacttatattgcacaccctgtgtagccacttcctagttcttaagatagtctgtggttctgtatttttgttttgttgcatgtgttcccccattagaatgtcagccccaggaggatgaggccacggggatctgacctgtcttgttcacctctttatccgcagcacagcaccatggctggaaccaagtgagtggtcagtaggtatctgtgagatgactgactggctgaggattgaacacttggctttcctctttttcttttgccttcaccttttaatttcttctggccatgctttctcctcacatagctcctatctctgtctttttgctatgcttctccttatttatacctcagtcaacaccagcattttgttatgaaagaaaagctgcaggtcagtgccacaaagaagacaatttccccaggaaatgaacacttcagtacttctttagtaacttctggggagaaatactatatttcttcatagctacaaccaaaaaacagaaagcctctctatccaagactgccttgtccatcccaagaaaacagagaactacagaaagcagcaggaatgattcccttgatgcttttaattcattcatttgtgttatatgcaattaacaataggccaactgatttctcaaagcatgcaatttcaagctgaaaaattaacctaggttattttccactcagttaagtatcaaaaagattttgaaaaataaaaaaaagaaaaagaaagaggaaaaaaaccaacatgagcatgttcttaactaatgagctatgcttatccactgttccactagaagagaattttccaaatatggacactctattcacaagtctctcttgagaaacgtggtgttacagtgtcaccattattaatattaaacttgatgcaccatatttacaaatccttccaaagggaaacaaacctgccctggaaacaatgcttataattataatcgtggattctatctgttcctcacagggaatgcttaaaatatcaatttaaatgcaaatgaatcttatcattccaaattagactcatcccattgtgttgaaattaatatagaaaataacaccgaacaccaaattacaagtaattaatattgacactgtgaaaagtatacactctcattttgatatttggggaagaaagtcttgtctgtgcgtgtgccattgtgtcctataagcaacaactagaacacaataccctcagtgctagtaatcatgcaggattaacacagcaaaaatctgagagggaggacaaatggcaatgatacatcttagaatccagtaatctattctttgggtctgaggaaaagcacttaaatctgtatttaagtgactacatactatttaaaaataaactatttgaggccaggcctggtggctcacacctgtaatcccagcactttgggaggccgaggtgggtggatcacctgaggtcaggagtttgagaccagcctgaccaacacagcgaagctccatatctaccaaaaaaaaaaaaaaaaaaaatacaaaattagccgggcatggtgtcacatacctgtaatcccagctacttgggaggctgaggcaggagaattgcttgaacccaggaggtggaggttgcagtgagccaagatagtgccattgcactccagcctccccaacaagagtgaaactctgtctcaatcaatcaatcaacaatttgagtcttaaaaattaaaatatttttcataggctgaacacagcggcccatccctataatcccagcactttgggagactagggtgggagtattgcttgagccaggggtttgagaccagcctgagtaacatggcaacaccctgtcgctacaaaaaaattaaaaatttgctgggaatggtggtgcatctgtagtcccacctactcaggaggttgagacgggaggatctattgagcctaagtcgaagctacggtgagccacaatcacaccactgcactccagcctgggtgacagaacgcaaccctgactcaaaaaaataagaaaaagtatttctcttaaatgcaaaggcaaagaggacctttctttgtctcttctgtacctaacgtaagggttggctaactacacagattctggccacctgtttttgtaaataaagttttatcggaacgcagccatgctcacttttttacttgatatctatggttgcctgcatgctctaagggaagggtggagtagttgtgacaaagtccatatggcctgcaaagcctaaaatttttactatttgatcctttaagaataggtctgctgaaatcccctggtctaatcagttgtgtgtcaagatgtaggaaaatggttttgttagaaacttaagtccagagagcttcaaaacaggctccagtgacagctgtagcaccttctagcagtgtgacatctggaaaactgctgaatatcttgggggcatagcaccctcatttgagagctgagaaaattgaactcttgtctgttgtaactctaaaatcttatgaaactctcctcccttccaataaaatccctgattaagaaacaaaagctgaattagttttgttaaggaaatggaatcgtcaagtagtttgaatctagttaatttgcttttgagaatgacagacattaagtcaaagtgatgctccttttccatgcatgatgctgtatacactaatcactggggctgagtgatttcaaagagttttgcattcatttactgtcttagctgggattcctccaaaagctgactgtgagacatggatccacaaaccagcattttatttggaatttggtgccaggaagcacaggtaggggagcaggggagtgaaaaagtgaaggaagtcaatacagggtgtgcacaagtgtgtcctactgtgggcaacaggagctcagttctgctaagcacccctagaacatgagttagaacacatgaaggagaaagagtacaagtatgaacacaccaactcttatccatcattggttgatgattaatatcaggatggagagaggaacaatttcctatacttctaagctgccatatcattggtgaatttgactccagagataaagagataaaatgctgacagatggaagttgtgtcaatgtgcactgatatgctcaaagcaaggagttattatggatggggcatctaatagcatctaggacacttacaaaatcagaggtctccaatcacacatccctatttgtaaaacaattttaactaggctctcctaatacatgtatagctatttattcagacagtatatgtatgtactactatcaatgggctatgtacattataaagcatatccaagaaagaaaattttaaaggataaaatataaataaatattaaaagttaaaatgcacactcatgttcatggtaacattattcacaatagccaagaagtataagcaacccaaatatcaatcaatcaatcgatgaatggagaagcaaaatgtattacatacatataatggaatattattcagcctttttatcaccttaagatcctaaggtcctaagattatttattcagaatttcaggaaggaaattctgttacttgcagcaacagggatgaactttgaggacattacactaaatgaaataagctagtcataaaaagacaaatattctgatcccacttatatgaggtatctagagtaatcaaactcatagagacaaaaggtggaaaggtagttgccagggtctgggttgagggggaaaatagggagttattgtttaatgggtatagagttttagttttgcaagatgaaaaagttatgaagattgtttgcataggtacttaacattactgaactgtacacttaaaaatggctaagatgatgaattttatgttacatattttttaccactattacaatgaatacatcgttttttaaatcaaggtaaaacaaggcttaaaagatttcctcccaacactccaatggatcatccagcacatcctcccaagtgagcacaatccacttttgagacctttgcactaaatacctagtctgtagccctgccctcagtgtaatcagcaaaagattctgtattaaaacataaaatcctctgtccagctagatgttaagatctctgtctttaagggagataaaacagaataataggaatggcaccaataaggatcatgcagacaggtagatctgggtccaatcctgcctctatatttagttactgtgatttgaaacaagttaattaacctctctgttgtacacgttgtacattcctgagatataaaagaaggatagcaatatgccttcatgttttcattcaacacctagttattgagagctatgctacaccagaaactgtagtatattagttacctattgctgcatctcagattacccccaaaacatggcagcataaaacaaaatacatatatatattttgtttcacaccgtttttatgagtcagaaatttaagagcagtttggctgggtggctccgtgtttctcgtgaggttgcagtcagcatgttggccatgactgcagtcaactgaagactcaaccagggctggaggatcgacttccaagatggttcacatggtggctgttggcaggaggcctcagttcctccttgcacgtagctctccacaaactgcttgagcatcctcatgacatgatagctgacttcacccagagcaagcaatctcagagagggaccaaaatggaagctacaatatcttttacgatctagcctcagaagtcacacaccacaattttgaaatgtcctattggttatatgggtcagccttgttcattgtaggggactgtatacaaggtcatgaatatcaggaagcaagaatccctaggatcccaactgggaggcggggacaagtggctgaatagagcagacatagtttctaccctcaaggaccttagcaactagagggtaaaatagactccaaagaaataactacagaaataattatgatctaggtgctttgctacagcggaagagtactcggtgatataaatgtgtttaatatggagaaccagatctgggctgccagttaagggaagatttccctagagtagctatccctatgctgataccttaagaatgaggaggagttagccaggaatctggaagcagaaggaacagcttgtgcaaagaccctgaggcaggaacatgctcagccctttcaaggatctgaagaaggccagtgtgtgtgtgctgggggaaagaagtatatcagtacgggaaggaaaaatatggcatgagatgacattggagaagtagaaagagaaccgactgtataaactttctgagccatgaggattcataacttcatcctaggagcaaagggaagcttcagggtggcagggagggggaataacatgcctagatttggcatttttcaaagatttgcctgctaaagagacagattgggagtgaacaagaaaggaggcagggagagcagatgggggcttttctaggagaaagattatttgccaaagagctgttatggttaaaaggaagatagagagagagaaagaatgtagttaaagcaccctgaacttcagaggtgctccctaaatagtctttctctcttcctcttaaaacagaaaccttcagggacacctaacataagatgatatctgcaaaacatatatctctaaaaaaagcagacaaaaacacaatcacttagcgcgggcctcattaggcacctcataagttcaggcactagggtcctgaaggagtcttgtgcacaggaaattcaggaggggagtcagcagtgagcttaaagcctcgctccaccaccagcaggaacccggactgacccacagagagcgctgaatagcatttatgatgcttaatcagaaagcatgcagcgttgatctggaaattaattggatgctcggatttttcgcacatcatggagagttagatgttacaaagattttgacgggaatatatttagtaacagtatcactgatgttcagtctcaagcaggggcctgtatctactctggggctcattatattctgagtgacaacgggtgcttagtaaatctcctttgattatgatgatcaaccaagtcactcagagtgtctttaatagataatgagaaattgtaccagagttggggttttctaaatatgaaatcaaactgcaattctcatgacccactgtgcttttatttatttaatcatttttacttaactgattcactattttaataggtagttttaaaagttaactctacattaccgccataaatggaaaatctcacttgccatataaataagacaatcataaaaatagataccgtctacccctaaaatctgccatgtacagctcaggttgggcacagcacaccctgagaactgctggacctggatgtgcttgtagtcaagggtcttggaaggaacagccgtggtcatcagttcacacagccaggatacaggggatatgcccttatgtgacatagggcatatatgatatagagtatatgtccacacattccaatatcaatatagggagagaatggtggagagagaaagggagatctctcaaattaacaacaatgaatatcgactgaacctgaagaaacagatgctctttggttcatggaaagggtgtgaacagatgctcaggcctgaacactgctcagactttgcagcttcagggaccatcggctaagagacttgtcttctggacttactgcctggggtaaggaccagggctcatttatcttatctctctaatctggggagctgtgaggactagaatgggtaagggttcagtgcagggtttacagctgctgaaaggtccctgtagcatttcctttatggaaaatcctatggatatacttaaagataggtatttgtgagggtgaaacctacctacaacctcttacactgctagtgcaaatgtcaaatggtgcaatccctttggaaaaagtttggcagtttcttgtaatgttaaacacacacttagcatacaaccagcaatcccactcctaagtatgtactcaagagaaacaaaaaggtatgtttataaaatggcatatacatagcagctttatatttgcaaaacttggaaataattccaatgcccgtcaacaagtgaatggataaataaaactgtgatgtgtttatacagtggaatactatcccacaacaaaacaaacaaactgctgctgcatacagtacaataggcaaatctccaaatgttgttagctaccaacaaagacaaatgcaagagtacatatactctctggttccatttacatgaagctctaaagccggcagaattcagatacagcgatagagatcagaacagtggttgcctaaggtaggtgaagattaactgagaagggcatcatatggtgagacaactcctcaaggtgatgacagtgtccactatcttgattggcatgatggtgactcagatttacatactgctaagatgcagcatgcatgcttaagatcacatatgctactgtaaattatacctcaattaaaaaacatgatttaaagcacaacctataagcaaaagagccagtttagaaatcagttaccaccaaaaatgccctgtgaatgtgggaagaatgagtggagaagcctgcccatgtcttgcctcagaattttcactgcccacctgctcacctccctaggttgtctcaggcataaacgaagatgatagatgtcagggcacttggaaactctccaatcgctgtacactctaaaaggggtctagtttaatcatttgtactaatttcttagaaatgcatcactcttttttccttatttgcctttttaatatagaatcaaggcttgctcatcatcaaaaagattcaaacattacagaagtgtagataaaataaaaactgcaatttcccttctctctcctctccttttcctcctctatacaacccactcactttccaattttggtgacgtggcagttctgcatggatctttccagattttttttctcccccaactgcaatcatacagtacaccgtatcatgcaacctgctcttttatttaacaacatattctctccaacagtgtggatattccgtcatttgtttaaccaagcccctaatgattgacattttgggtttcccctaaagttttgctgttataaactacgagacgaatgtgtttccttgatcttcttcaaatccttgtgtgaatatccctttagaataagttcttagaagtgaaatttctgagtcaagtagtacatgcaatattaattttaataaaccttatcaaattattctctgaaaagattgaatcaatgcatagtcctcccaggagaatcccttctcattttgatctcaaagacaggaaaaataaagttgagagaatgctgaaatattcaaagattctccgatgcccttgaaaagcagaagtggagctgacatcaacatggccttattttcgctgctgacttgaaacttccataatgaggaaataaaacacatgatttaaaaaaaataaaaaaactcatcaatgagattaatgagagttgagagcctatgacttgaacatttgctggttaatagatgtagggatggaaacagtgttgtgccaattactgtaattaaccagaaatgaagacaaatggaagggagcctcttctgcccaccaagcttcaacttaaatgctgagtcatgagctactagtggaggctggaaggccaagacctgggctagtgctgggaaaaggaagtagctcttattctcccaaatgtgtgctgggtgctcagaaacagagacagtgggaccccatctctacaaaaataaaaatttaaacattagctatgtatggtgacatatgggtgcctgtagtcccagctactcaggagactgaggtaagaggattagttgagtccaggagatcaaggctgcagtgagctatgattacaccactgcactccagcctgagtgacagagtgataccatgtgaaagaaagaaaaaaagaaagagagagagaaagagagagaggaaggaaggaaggaaggaaggaaggaaggaaggaaggaaggggaagggaaagaaggaaaggaaggaagggaagggaaggaaggaaaggaaggaaaggaaggaaaggaaagagaagccatcctgtcaaggagtcccaaatatcccctgtctcatgtagctcatccttcaggaaataggacactttccaactaacacagttaggctatatcccccaaggtattatgtttttccttgaatggagtcaaacactttctaaactcgagagaatatggccctgaaggaaactacgcctgttcctgtgatgaaatgacctgacaggaaagaactcagcatcttgctgacaagtcaggaagaactcacaacctgcccagtggtcattttagtcaattttggggggaaacagttcttttgaataggtcccctaaaaaaggcttgaaagaagaattagtacattccaaagcagtgattagaaatcatcataattttctaccaggagaagagcactttattattacttaaaattactctagtccaatagccaattgctatattttatgttaacttttatttacaggaagtacaatgtattccttttggtgcactgttccatgagttttgacaaaagttcatacagtcaagaggcagaacatccccatcacccaaaaaactttcctcctgctgccccttttcccactcgcagtcctggcaaccacagatctgctttttattcctacagttttgtctcttctagaatgttatacaaatggaatcatacagtatacagcctttgagtctggctttttcaagcatttattctttatcaatgtggttgcatatatcaataacatgttcttttttattgttgcgtagcattcccttgtgtgatgtaccacaatgtgtttatctgttttccagtctgggaacatttggataactttcagtttggacgattataaataaaatcgttatatacatctacacacagatttttgtatagaatttagatgtcctctgtcttgggattgaggggctgtatggtaaaccaactgctctttaatgtctagaaaatgtgacagtcctcagagtcatggagcctagaaaacagtgcggttgtccctggagttcagaatgctttactctgtaaatatcattcttacttggatagccttggtctgtgagtaaatgtgctatgataggcgttgtgtagccgttcatcccagctctgtccccagaatcagataaggactcatgctgtgaactctgatgccttcagtccaatgagaccagaacatcacttgcccgtttttattttaggtctcgtgtcaagctaagctaagatacttcattcctttttcttttcccatcaaattttgtatcttaaaagtttcaaaaaaatttataagcaagtatatctcaagatttttaactgaatgaaataaatttaaataaaattctgagtatttttccatttgattttttggaaaatatatgcagttcccaaatttgaacaataaatgtgcatttataatgtaagattatgctcccagaaagctaaaaaaaagttagaattatcataattacataatccctattatacttcaactcttagacataatttttaatcatttatcttcaaaaagatgaatatttttaaattttttttcttttttttcaatcactattaagcacagttgagttaaatccagtaagcattctgttgggactaaagattttctgttcaaagcacacctaatgatttctctcttgtttcaattgtattaaatttatgagacctctattttatctctagtgtcagtttatttcatttccattttccacttgttttcctaaaataacaacaaaatgcaattaaaatgtgtaaataatgctgcttacaacacctccatagctaagtgtggtataaataaaagtggtatggcactagcacattaaaaaaggaggcttgaaatatcaacatttaatgtaaaaaaagtacaagtacagtaatggaaagctgaatgtttaaagatttggaaactcttggaagcatgcttgtgttgctctaccgaattccaaaggcaaacagttttattttaataatttcgttagctgggcatggtgacatgtgtctgtagtcccaacaacttgggaggtggagacaggaggatcgcttgagcccaggaatttgaatccagcctgggcaacatagcaagaccctggatctgttttctgtacctatagttttctctatgataataacaaaataataataattttgttaatgttcagagcatgagtgagctccacctgacaactcttataatgtcaaatgatactgacgtcaacaaaacaacttagacaattcttgaaatttgcttatttatctgatacatttgttgagagtctattatgtgcaagtggtatcaagtaaaaaacccagtgcatatccttgaaccacttggagagaactggaggggatggaaaagcgagggatatctgttcacagcagagtgtcatgtgggaagaggacatgtccttgaaccacttggagcgaaccgtaggggatggaaaagtgagggacatctattcactgcagagtgtcatgtgaggagaggacaaggaacagggaggcacgggggttggatgagctctcttcctggttcttgaaaatgccacgaatgttggtggtagcaggaatggcaaagagcaccatgagtcagggacgtgtcatctccaaaaggtctagggcagagtatttccttcccaagaaaccagtgtcccataattcacctgctggaacccctgtgcacaaagggattgtgtgattaatgtagattttggtgtttcatattgtagcaacttaataaggtatgtgcccagcttctaaatgaaggctataatcacttttccatagtttatgaattatgaagttggattcccatcccaaatgctgtccaagttttttggcttcaaaaccaattaaaatgatgaatagctgtgaaaagaaccagaagtgcatttaatctttcttcagaacagttggggatcagttcttttttgtcacatttcacattagctgggaacataaacttggtcttgttcaaaggttcaaactacttcttcctgaaagagaaccgatctacttaactttttttttccccagctattataaacactgagatatttacaaagtgccttgtacttctttctgtttatctcccaaggtcacgacactctatttgcatcttctcttagcaatgttatcctaaaaagaatcatcaaagcaaagattaactgttacaagaaaaaacaaataagcgagaagattacttacaaatttcgggggttggtttattatggatgcaaaaatgagtagaaactcaagtccctgagtccacctttcatgacggtagtcctgattttgctatcatttaatacaacttaggtcttaatgttctcactcagtgctgagtgtgctgggataagcaaggtgttcacagtcttgtacatttttttctttactttttatcataaaaatgagctgcagatgtcatgcagtgcagagagaagagaatgctttctgagtcagaaggtcacattttttgtactcaaccacttctagctggaaaaccttgagcaaattacataatctcatggagactcagttttcttacctgtagaatgggggttataatatttaattctcaaaactgctgtggggctcacacaaaattaatttgtgctgaattacacatatttgtaatttatacataaaacttatatgtatatgtataatagcaacagacccctgatacagtatttattattcatatacctgtccttttgacagaaggaaaaaacatcatctaagatgtgttttagacaaagtttccaatcaatgatatttggacacaacagccccttcgatgaggtgactcagctatcagtgaactcatctttgctatttttagagctgaaaaaggagaagcaggtgatactgaagttgtgtaatcagtctcagggggagggctataaactagtgtctctgtctctctcaggacatctggactcaaaggtagtggcctcaacctcgccagccattcaaaggcaagcagaactctcacagaggaggcaagggcggagaagctttgagcatctctacaacatcagagaacacccagtcaaaagagagggaaacacaaattgacttgtacctcatcaccttgacaacacaaatttagactctggctgctacattatcttctggttccttttccggagctgctctccttgagctgatttacacggttgctattgtagacccttgactgtacacccagtctttgtggaactccaagaatcaggcttcaattgtactttgagccagctacactgggccccttcaaccctcagccttctctccaggcaagtccataactgcagctgtggtaagcccatctgcaggctgccctcttcctgtcctgagtcccggagggcatccctgtgtgatcactggccttaacctctcattaagctatcaaagctaccttccactgcttttcttaaacccacgtcttttctatttccttcaacttcaaattagccattgtttccacatcatcctctcatgacatgatagggaatgaagtgatgatggctcacagcactgctggggctgcttttacaagaagctcactcaaagtcaacttattttttttttttttgaaacagggtctcactgtgttgcccaagctaggatgatacagttgcacaatcatagcttgctgcagcctcaactcccaggttcaagagatcctcccgcctcagcctcctgagtagctgggactacaggtgcgtaccaccatgcctggttaatattttttatactttttgtagacatggagtcttgccatgttgcccaggctgagtcaaggtcagttttgtcaccatggggggcatagagagacctcagcagtgaaggcctctaggaaatgggagaaatccaaccaggctggaacaaggctgggagaatcggccagttctagggcagttgcctaagtagaatgggtcatgaattcgaatctgcttcaagcgatactcaggtcaaatttggacaatgaggccaagcaaagacttgagcacagaatcaaagcacacctagagttacctatgtgcatctccgtttttgctaaatccaaattacaccttactatactgttaacttttatttgtctatatcatttgttggaatccagaaaacatacattgtttctttccaggaaaaagtcaggtataaaaataagtgtgtgttgaaatataagcacattttaaaaagaaattagctcctattctcattcctgcagcttggcattgagtttgtctgtaattgggtgtgttttaaaattaaaaatttgaaataaacgttaagcagcaggagtcaaaaataattcagaccgtaatattcatcaaaacttgtttaatagcaggaaaccctccactctgaacttttactcttctttcttgcagaatcaatccctccagcagccctcaactaccagaagcacaaaaattcaatatatttttttttttgagatggagtctcactctgtcgcccaggctggagtgcagtggcatgatctcggctcactgcaacctccacctcctaggttcaagcaattctctgcttcagcctcccaagtagctgagattacaggtgcccgccaccatgcccagctgatttttgtatttttagtagagatggggtttcaccatcttggccaggctggtcttgaactcctgacctcatgatccacctgcctcggcctcccaaagtgctgggattacaagtgtgagccgccgcccccggccaaattcaataatattatgcttagtagtcacacactttctcttgttttcttttgttttctttggctcattagacctctccttcagaaccaaagaaatccattgtgacaactctgttctcagagctgactttttccatagagagaacttcagtctgagacatgccaaggagttcttgacgctcccaaaattaacacctttcaatctttactattagagattaacttgtttcaatgcccattctcttctgttaaagcagataatattgggaaaggcaatgtctgaatgtatttctgccaagatgtcgatggtttatcaaaatcaatttcttcctgtggaagagtttaggtgcaaggggaggagagaaagtgagagaagattataacagggaggctatggatgcagaaaggaaaagcggggaatcaaaggcaaacctgccacccatttcacaaataaaagaatcagtgtgggctggatgcagtgtctcatgcctgcaatcccaatactttaggaggccaaggtgggagggtcgcttgaggccaggaatttgagaccagcctgggcaacacagtgaaactctgtctttacaatttttttttaattagccaggcatgatggcacacgcctgtagtttcagctactctggagactgaggtgggaagatcacttgagcccaggagttggaggctgcagtgagggatgattgtgccactgcattctagcctgggttacagagtgagatcctgtctcaaaaaaaaaaaaaaaaaaaaaaatgcagattcagtcagtctgggctggggcctgagattctggatttctgacaagttctcaggtaatgtcagtgctgctagtacacagatcacattttaagccacaagaaggctaggatatgaggtatgaacaaaggtgttagctcagtggttctcaacctggactatacatcagaaccaccaaaagaggttctgttgggtttgttggaggtttgtttttttttttaagctcctgatgctcaagccccaccccagattaattaaatcagaatctaggaattgctcaagtatttgtatttctaaaagctctccaggtgattctcttgtgcagcttgagttaggaaccactgttagttgataactgaaggtgctattaaaaattccataatatatgagctcatgaaggctaatgagacaccccagctaagggcatcttcctctgcaacagcaatttgctattgtacaatgggggcaaacagttggtgctcaataaatttgttcaatgaaaaaaaataagtgattggctgaatgcatgaatgaatggaaatgtttgaagtcaacagtctatggaatgaaaaggattacagtcctattatcaaaatgacaagtggcaggatgggtattttaagacagatcatcttttccatcactctttcaaataccccatagaagtacttaaatcttggcccacttttaagcctgactttgttaataactggaggagtcaaagccacaaattttccacaccattactttattccagtgtttgccaaaccaaccaacagtcactatacacttttgctactggtgttattatttacctagtatgtttctttaaattgacttactttttaacataaacaaatgtattttaaagggaaactataaatcactatttcaaatagaaaagcaactaatattccatgacatcagtagaattgacagtcaaaataaatgcaacgtaagcaactgaagcagggtgtttctgcctgccaatgcttgcctctgtcagataagaagaaggattaacaagtatacggaggtgttaaagccatgggggcacttagcagagactttgtcactggcataataaggattgcaggagcgttttgcaaggagccacagtcctgccgtgcgatgccatgttatttaacatgaaaagcaggcaccacgtgtaagcatctcatggcattttcagtcaatgattgtcaagctgtactcagaaacccaggggccaccaggtagtgttgaagaggctctagaaaaaagaggaagtatttcagattctgaggaattcagtcgtcagtgttatttgtcttatagagagtatgatttttttttaaatcctatttctataaggaacaacataatcaacagagaacaaagaaacaggttgaaccctgccattgaaatcaggagaattaaccttctcattggaggcatatttgctggtttaggcctcaaaggcattacatcaaccttggatgagacaatttactaaataaaaccatgttattaaaaaaatgaatggaccatacaaaataatatatttcatgtgctcccctagctctttagtgaagtatggccctctgtgggaggttaaattattagctaaatgtatatacttggatttaaacagaatgatccactgatgttctaggaagtaaatgcactaacttattcttttttatttgccaggtatttgcttttcttttaaataatgcatgcagtagaatatgattaatataattctgatgcagaaaagcaagattgcacacttaggagagaggtctctggagccagactgcctggtctaaatccctgctctgcccttcatcatctgtgtgaccttgggcaaagtattcaacctctctgtgcctacactgccctgcttataggatgaggatgacaataagggtattacccacataaggacatcataaggatgagtaatgcatacaaaatatctaagagtcccctatacaaaatacgcactccatatgtgctacctgatatcattacagtaaaaaaaaattacacaaaatgtaatttttactaattttaattacaaaatgtaattaaaactaagtcttccttccaccctagaccccacgcctctccccaggcaaagtactgtaaaaagacccttgtgcttcttctcagaactactctatacttaccatcaagtccatccctctcttctgtgcaaatgggagcccactatccactctattctacatattgccttttttgcttaacaacatttcttgggaatgagttcattgctagtttcatacctcattctttgccagagctgcagagttttgcatcatatgggtgcaccagaatttctttaactcatccccagtgttggagatttaggttgtttctaatatttcactattacagtcactgccagaatgaatatatttaaatatacatctttcattcatatggaagaatatctttagggtagagtcttagaggtggaattgctgggtcaaacagtccattcatgtttattttgatagatattgccaaatttctcttcaaagagattgtgccaacttccataccaaccaaccacatacagaagcacctgtgtcccctcattctcaaaataatattttaaatacattaacaagatatacaaggtaatcaagttttttagtctgtttgagctgatataacaaaatatcttagactgagtaatttataagcaacagaaatctattggctacagttctggagaccagaattccaagaccaaggtgccagcagatgtggtgtctggtgaaggcctgttcctcatacacaaggacttcctgccacatcttcacatagtggaaatgttaaacaggctccctcaggcctcttttataagggcactaatcccgttcatgagggctccaccctcatgacctaattacctcccaaggaccccacctcttaatacaaacacacagggggttatatgtcaacatatgaattttggagggacaccaacattcagactatggcaccaaggaatgctattatatggaagcagttatcaaaagattgaaattacacatctgtgaaatgctaacatatgtcctttattaatgcatcaaataacaaaatctagtggcaggtaggggtgtgctgaaaagatactttttagcataccggcaacaaccctaatgtggaatgaagatacatgttgatgatatgctcacaggtactgctaataatactgttgtttgtacttcccattcgtaattgaaggaaatgcttgatttgaggtggtggctagtgcaaataacaatgtaaatttttccacccaagttttagagcctatcttggagccagctcttagagcctcattccaatgaatggcagcttatttttaatacatcaggtcagctccaggaatgtacgcttttagggaagctcttaaaattcatgtgtgggaatcagcctccatctagcctaatacatgcttcactggccttctaaaatagcaagccgagcaagaagacatagacaggcaaaggccactctaaagataccctccggaggtgtctgcctcggctgttacttagagcaactgtttgctccttcctgcaatacagctgcactcctccaccacagggttttggaaaatatcaattaaataatatattttaaacaactttgaaaaagataaaggcatctttttaatttggggcaccctattagccattaagaattaatgttattatctcctcatctgtttagtgtttagaacctctcccaagtctgctgataatggtggcaatgagggccaaaggatggagctgcttagctctggtaaatactggccaggcacagaggctcatgcctgtaatcccagcactttgggaggctgaggcaggcagatcacttgacgtctggagttcgagaccagcctggcctggccaacatggcaaaaccccgtctctactaaaaattagccaggcatggtggcacacctgtaatcccagctactcaggaggctgaggcaggagaatcacttgaaccctagggacagaggttgcagtgagctgagattatgcccccgcactcaagcctgggcaacagagcaagactctgtctcaaaaaaaaaaaaaaaaaggcatggtggctcatgcctgtaatcccagcactttgggaggccaaggcgggtggatcacgaggttaggagatcaagaccatcctggctaatatagtgaaccccgtctctactaaaagtacaaaaacaaaattagccaggcgtggtggtgggctcctgtagtcccagctactcgggaggctgaggcgggagaatggcatgaacctgggaggcggagcttgcagtgagccaagatcacgccactgcactccagcctgggcgacagagcgagactccgtctcaaaaaaaaaaagaaaagaaaagaagaaaagaaaacataaaatgtccagccacccaggacacaactgtgtggcctgaccgttcagttgtatcactcctcttatctggaaagtgctccagtgactacagaagttgctagaatttccaaaagcaagaagaaagtgatgggaaaatgtgtcaaatccacaatgggagaacactgtgtcactagaaaattatatgaccctggcaaccttaggagtatggaagaaagatttcaaacaagtttctgactatgtatctttttctaaatttttttgaatgctgaagaaatgttaaatttcattaagttttacagccagatttaatatagacataaatccctttaatgttcgtttcagtcaaaagtgagcggaacattatcgttaaaccagtgcatgtgggagaattacttgaggaaaatcaaaataggcacagttgggaacattaagccgtggccatattagacgcaagtaggcgcaatagcaaaattctttaggctctaatggactgggctattttgcttctcagtttccatacagatgagctttgttctggggcaatatggttgcagtttgagagtctatctgaaggagctcatttctctttcattagtccatgagcacagtgcaatttcagctaatactgttacacagctcctagctgggttatttggttaaatgccttcagggaaagtagcaagacagaataaaaggacaaatgcaatgcggtttcttgttctgagttcctgtagctgtggaattacattggcagttaatcattaccacgttgtactcgtgatcataaactcctgttatttaagatgttattcaagtctcacaagaaacatcttgtcttctgtggcacaatttccttgaggtcgggtttgtgcacaactataaccatagagacctgtttcttgtgcttcgtggacatgctagtaggtatatagtgccatttgtgtgaaattgaaaatgacattccctactggtgggtgaactgggaaacagcaccctgtctatgggcaaattagaaaagatgtccccttctgggtggacaaatgagcaaaaggcagcccctctgggctgaccaattcttttttaaagcctcctccaccttggggtgtgggggtggtgcacatggcttggtaagtccaatgcagaccctagttgctccctgtgggcaggaacccctggcgcaatgcacaacctgcacaactgtacacaacagccctgattacagaatccattttcacaattttgtagttggaccacagagtttgcccctcagtactctaaaaatatctgttcaatcacatcagtggatgtccatattaaatacattggtcttctttcttatggcaagtaactgccactctctgccaagggcagtgttctaaccttggaaacaaacaggacactcgtaggttgagaaacagaagaactagaggacggtgactcctaggggcttgaccagtggtgggcagtggagtggtggaaaccacggtggcacctcttcaccatcgcaatgtaatgctctcctcagcctccatcattacctggtgagctggggctcagtatctgcctgataacccaccttcagctagcatgagacacaggaggagcaagcttcaaactcccaacaaggtagtcagcctagttcataccagattcagtggctgtagcccaggagagaacgaggtatggggcacgtatgtctcagagcagagagatctgcctagaaagacaaagactgagtgagaagctatagtgtgggctatcagagggcagcctgggagcccaagaggcctcggacattggtcagggattggcaaactctttccgataaaaggccactttgtaaatactttaggctttgtggggttttgtcacaacgacttatctctgctgttagagtgcaaaagcagcgactggcaattcataaacaaatggatgtggctgtgttccgatacaactttacttacaaaaacaggccatgggctgatttagctggtgggccatattttgtgacctttgctgtcggtgatcaaagaaagaggacacaacaggagaagtcaggtgaggcattgcccatactgcgtggggcaacgtgcttgccagcttacattccttgtttcattttatcctcacagcaaccaactagtaacagttttaccacctacattttgaagatgaggaaactacagtttctaaaaaataggaaaatttccagggtcaaaaacagcctcatttcaaaaccaagtctgtttgacttgaatgtctctcttccttcccctacatcaagctggtacctgcagacgtatttgtctagggcagcccagccagggaagcccattgatcacagaggcattaaattccagatttgaaggtatggatggcagtgccagggccaggtgcaatctcaggagcctcagaagcttctctgtggatgtaaaagcaatgggcacagccaccattgactgcaggagctctcacctctctcatcaccagccattcagatagacaagccccaaatccgaaaggtgtcatctgtgggcctgcgtctttgatagccaggcaattacagcacctcatatataaaaagccagaggaatctgtgaatataataagtgactgtcctttcttagcgtggtgcaggccatctgtttgaaaagtacacactgcaaacaatgccaagttgtaattattaaactttctagctaagagcgagtctcatctttcttcctaattatgcattcaaatattcagaaattaagccttagaattattatataccagggatgggtttttttcccctgtgcattaaacttttagaagagaacatgagccatcatcagaagtttctcccagaaataactcccagagaagccctgaggtcagcttggaatcaacccaaccttctcactttcggtgtgatggtacaatgataattcaagttcttaatgatgactctgaatcatctcgatcctgaatcatcagagattaaattattttcaccaaacagctagtattttctaaagcaggaaaatcgattaaaggatttcagtaaaaagttagagaagtccaaacaaagcaagcatctggcaagcctcggtgaccagaacattaaattcaccaaacaccacctgctccaaatgtccatgttaatggcaattatagaagactccagtagcattcaaggccagtttaacttattcctgtacacaaataactttatgggagacagcattgtaattcaaatcaataaatgactcggtttggctgtacaagcataaacagaacgcttgcaaaatatggttcctccttgctagaaaccatttgatttttagccagaaaacatacagccaaacaagaataacaactgtttgccttccttaatgttcagtgtagactgttacccaaggaattaagcattagtcatcaaaacttcattgcaaaggcaacaaaataattggggttcctgagttatcatccatttcaacattcagaggccaatttgaccccagacaatacaaggtctttcttcttgttataaaagtggttgcagagttctgagggttctctgctgtaagctctgctctcagaactctccaggtcctgcttccaacccctgccatgtccggccaaactattttcccagagtcaggagcagagccaacagcctcactcagacagaccccagtgataattatcagcccaaaagataagcccaagtggaaagtttgagaagccagtcactcaggcagcagctacaaagggacaaacactctctagttttccctcactgacttcatttccctctgccagcctggtagaaacatggtctcagtccgctcaggttttgcccctgtcctccctgtctccagaagcgccctcaagcttcaaaagattcatacagccttccagagagggagacggggacctagtgctggttttcatcatctgtccactctggcttctgcagtaacaccattcccattggcctcggtggtcagttcacccagatcctgcctaaaccctggatgcttattgtcctgaccacccgaatgtcctaggccagctagttctcagcgtcacatcctcaccaacctccgctccctgctctccactggggatcaagggaatgcaggatggagctgccccaagcctgtagctcagatgcctcacaggggcatttctgatctgcaacactatgtccctgttgtgagctgagtcccaggcctctctgaggttggacatcccagcgtgcctcttcccactccaacagcacacctcagaaggaagaggcagcctcaggggcccgctgagtggccactcgtgctggatttccacccacctcaccttagggaattttaattttttctaaagagaaacaaaccagattgggcagatactcttccaaatctactgcttaagtttcaatctcagctttgaagcccagaaaaaaaagtattaacttgtgtttctctcgatattcctaccccactaactatacctaagaatgctgttatctctgaaaaattcagaggttaggagaacagaacacccttggggaagacaagttactatttcaaaatagtatctctgaaaaaaacagaaatccaaatatcgcatgggaagtcagtgggagaaaggccaaatctgagagggtctcccaggaacacggattgcgggccagatacagaattaaacttttaaagtgaatgaaagcaatctggggtctaagtggggaaggagtcgaaaaactggcaacttgccagtagttatggtcagtggagacgagaagacttcctcctctctgaaagccaagtgttgaatgaagacctagatcctggaataaaggatcaacatgcttaagactccaggcaaattactgggccaaatttcagggtgactcctgcccaagtacagcatttatttaaataaattagcattacaactctgattattacaactactggtgattttgtcacctaaacaataaaacaaaaattaatggaattagtggagttgctcttaaaaacattatgccaccacattaggcttacaaactcaagtgtgtcacaaaacttgtgtgttatcttatgataaagcacagttcctaaatatgtctcaggacccataacatcaagaaatgccaaagctggaatgtgcctctaacccagtgtttcctggcccagtgtatactgtgaaccaagaagccatctggggtcttcatttcagacccccaaaacaaaggagaggagaatgagatgaggaaaaaggaacttgagagagagcagcttctccaagcaagcagagaagggaatggggaaggaatgggttattcactaaacaatggtggatcatctcccattacagaccagaataaaaggcaaaccaactaaagacctaaatgttaaagaaaaaaaaaacccacaaaattgcttagacagttttagtggctacataattattttatgtggggaaagattctcagtgggaaaaaggaaggtgctggatgacagagaatagtacacttttgaccatatgctgtagggcataagagttcatacagatacttattgaagtttgtaatggtacatttctttgtttgatctttcgattgatgtctgttcccgcaactaggctataagttacataagggcagggatgccaccattgtattcccgtacttagcaaagtctctgacatatattggactcttaatgatatttgttgagtgaataaataaggtcaattgtggacaacgtcagggccttgggcatggggtttaaaacccataaggggaaaggaaaccagcctatgctagtctgaaggaagaagctggttgtgagctttctgtgtaaagcaaggaaactctagaggccatctcacttgtgatgtgagaactagaacatctggccatctgtccaaggaaggattaaggaagcttaccctacatcttgggttccaggtgaaatccattaaccacaagggctacatcaacttgaaaggaagacagtcctggagaacacagggcttacatttgctaaccccttgaaggcttgaaataggatgaaatggggaagcctgaaagagaatatcaagagaggatggaaaaccccaaagacatgctttggctccaacacaattttgtgaggtttggtccagtgcagcacactaatccagcactccagggaggactagaaatgtttaaagtctcccagcgctttccctttactgcgcctctggctgtacggacctaatgagatgccttgtgtttttcagaatgccgaagcaagttacgacttcagcagcaacgacccctatccttaccctcggtacacagatgactggtttaacaggtaaactgggccttgggaggtctctttgactttaggctttggggttttattctactttgttttgtttcaggcttgactaccaccagcaaaataatccccatgcttcattaaattatattgtgatttttcttcttagtggttacattctctaaagtgaaatttttaatattacaatcttcctctagaataatcttttgactgttttgttctgctaacttgaaattatttgctactttaatccattaaagagaaaagaaaatagaaataagaagttctttctcaacccattacaaggtgatttaaaacatgctgattttgctttatgtgttgaaactgtcgtagagaagtattttgccccatgggtctatgtgtttttgaaaagcattctgtacgctttctgctataaccccataacagctcatggagtccctttcaacaaaacagtaagtgtgattggcagaggtttgaagtattgcttgggacaaagatcctatgatgtcaaactacccaaacagtccatccaagagaataattttccttcagcttgttttgccactaaacatggaaatgtggtctcttttttcttcaagtaaacatttttcttaaatggttaattacatataagagatatgaagaaataaagatgtgcggtttgctcaatgaaagaatactgtaatttttaaacctagtgtttccctgttattgacgtccttgggtgaagttcataaaaacatatgaacttcaattagttgtataaaaatatatgatgtgcagagcactttatccatttttttttttatttctcatggcactctaagtagcacataaaacaaatgttgtcatttttagtttagtgataaggaaacaggctcagaagggttgaagggcttccttggtcaaacagttaaaattcaagtcaaagccaagattagccccatgcttcaaattatttccaaatccacatttgtactattctttgctgagtatcatttctattatttgatacaggcagcatgatgaccagaatatgttcaagggtagagcctcagtggacaggaagcttagattctgtctctaaagttagcaagttgacctgagacccctcagtctcatcaagggttgacacagggtacacaggttctgagtacaaatgcagaaaataagaaaaaagaaaatgaaatttaattttgtaatattttgtaaagatcattgctgatgtcggatagcacaattcattctctatccacatcacctgcaacctgaaaatgacatacaatgcttggaggtgtgtgtttagaggatgagaatgtataaaaaaggtctgaaaacttttggcatgaagtgtgttttatctctgtgacttctaaccctagatggtagcatatatttagcaaataaaccatttcagacacaagaatgtgaagttaccaaatgtgtgccattaagctggggtttagacagaattggcagtggccatccagggcacagtgctgagaagggccatgagagggtctggcttcagcaggattgattaccagctctccgcatgaatatcagaaagtgcagtggcaacatatccactggctacttgctgtctttctgtaactagtaggtactaaattagtctttgatggattgatgtaagcacaaaaatataaccaatggaaagattatcccccaatctcattttctgaacccaaacaaaatctaccctagtcaaatcttcctgggcaatgtgctataaaaatactccttaaaaaaactaaaaggttccactccaagatggccaaataggaacagctctggtctgcagctcccagcatgatcgacgcagaagatgggcaatttctgcatttccaactgaggtatctggttcatctcattgggactagttggacagtgggtgcaaggggtcggaggatttccctttcctagccaaaggaagccgtgacagactgtacctggaaaaatgggacacttctgcccaaatactgtgcttttcccatggtcttagcaaacagcagaccaggagattctctcccatgtctgggttggcaggtcccacgcccatggagctttgctcactgctagtgcagcagtctgagattgatctgcaaggcagcagcctgatggagggaggctgagacttgagtaggtaaaaaaaagcggccaggaagctcagactgggcagagcccaccacagctcagcaaggtctactgcctctatagactccacctctgtgggcagggcatagctggaaaaaaggagcagaagcttctgcagacttaaacgcccctgtctgacagatctgaagagggcagtggttctcccagcatggcatttgagctctgagaatggacagactgcctcctcaagtgggtcccttacccccatgtagcctaactaggagacacctcccagtaggggccaacagacagctcacaaaggtgggtgcccctctaggacaaagcttcaagaggaaagatcaggcagcaatatttgctgttctgcaatatttgctgttctgcagcctctgctggtgatacccaggcaaacagggtctggagtgggcctccaacagcctgcagctgagggacctgactgttagaaggaaaactaacaaacagaaaggaatagcatcaacatcaacaaaaaggacatccacacgaaaaccccatttgtagatcaccaacatcaaagaccaaaggtagataaaaccacaaatatggggagaaaccagagcagaaaagctgaaaattctaaaaaacgagtgcctcttctcctccaaaggaccgcagctcctcgacagcaacagaacaaagctggatggaaaatgactttgatgagttgacagaagtaggcttcagaagctcagtaataacaaacttgtccaagctaaaggagcatattctaacccattgcaaggaagctaaaaaccttgaaaaaaggttagatgaatggctaaccagaataaacagtgtagagaagactttaaatgacctgatggagctgaaaaccatggcacgagaacttcgtgacgcatgcaaaagcttcaatagccgatttgatcaagtggaagaaagggtaacagtgattgaagatcaaattaatgaaataaagtgagaagacaaggttagagaaaaaagagtaaaaagaaatgaaaaaaccctccaagaaatatgggactatgtgaaaagatcaaatctacgtttgattagtgtacttgaaactgacagggagaatggaaccaagttggaaaacactcttcaggatattatccaggagaacttccccaacctagcaaggcaggccaacattcagattcaggaaatacagagaacaccacaaagatactcctcaagaagaggaactccaagacacatacttgtcagattcaccaaagttgaaatgaaggaaaaaatgttaagggtagccagagagaaaggtcgggttacccacaaagggaagcccatcagactaacagcagatctctcagcagaaaccctacaagccagaggagagtggggaccaatattcaacattcttaaagaaaagaattttcaacccagaatttcatatccagccaaactaagcttcataagtgaaggagaaataaaatcctttacagacaagcaaatgctgagagattttgtcaccaccaggcctgccttacaagagctcctgaaggaagcactaaacatggaaaggaacaaccagtaccagccactgcaaaaacaccccaaattgcaaagaccatcaatgctaggaagaaactgcatcaactaacgggcaaaataaccagctaacatcataatgacagaatcaaattcacacataacaatattaaccttaaatgtaaatgggctaaatgccccaattaaaagacacagacaggcaaattggataaagagtcaagacccatcagtgtgctgtattcaggagacccatctcacgtgcggagacacatataggctcaaaattaagggatggaggaagatctaccaagcaaatggaaaacaaaaaaaacacaagggttgcaattctagtctctgataaaacagactttaaaccaacaaagatcaaaagagacaaagaagaccattacataatggtaaagggatcaattcaacaagaagagctaactatcctaaatatatatgcacccaatacaggagcacccagattcataaagcaagtccttagagacctacaaagagacttagagtcccacacaataataaggggagactttaacaccccactgtcaatattagacagatcaacgagacagaaggttaacaaggatatccaggcttgaactcagctctggaccaagtggacctaatagacatctacagaattctccaccccaaatcaacagaatatacattcttctcagcatcacatcgcacttattccaaaattgaccgcataattggaagtaaagcactcctcagcaaatgtaaaagaaaagaaatcacaacaaactgtctctcagaccacagtgcaatcaaattagaactcaggattaagaaactcactcaaaaccacacaactacatggaaactgaacaacctgctcctgaatgactactgggtacataacgaaatgaaggcagaaataaagacattctttgaaaccaatgagaacaaagacaaaacataccagaatctctgggacacatttaaagcaatgtgtagagggaaatttatagcactaaatgcccacaagagaaagcaggaaagatctaaaatcgacaccctaacatcacaattaaaagaactagagaagcgacagtgaacaaattcaaaagctagcagaaggcaagaaataactaagatcagagcagaactgaaggagctagagacacaaaaaacccttcaaaaaaaatcgatgaatccaggagctggttttttgaaaagatcaacaaaagtgatagatcactagcaagactaataaagatgaaaagagagaaaaatcaaatagacgcattcaaaaatgataaaggggatatcaccaccgatcccacagaaatacaaactaccatcagagaatactataaacacctctacacaaataaactagaaaatctagaagaaatggataaattcctgaacacaaacaccctcccaagactaaaccaggaagaagttgaatctctgaatagaccaataacaggctctgaaattgaggcaataattaatagcctaccaaccaaaaaaagtccaggaccagacggattcacagccaaattctaccagaggtacaaagaggagcggttaccgttccttgtgaaactattccagtcaacagaaaaagagggaatcctccctaactcattttatgaggccagcatcatcctgataccaaagcctggcagagacacaacaaaaaaagagaattttagaccaatgtccctgatgaacattgatgcaaaaatcctcaataaaatactggcaaaccaaatccagcagcacatcaaaaagcttatccgccacgatcaagtcagcttcatccctggaatgcaaggctggttcaacatatgcaaatcagtaaacgtaatccatcacataaacagaaccaatgacaaaaaccacatgattatctcaacagatgcagaaaaggcctttgacaaaattcaacagcccttcatgctaaaaactctcaataaactagatattgatgaaatgtatctcaaaataataagagctatttatgacaaaaccacagccaatatcatactgaatgggcaaaaactggaagcattccctttgaaaaccagcacaagacgaggatgccctctgtcaccactcctattcaacatagtgttggaagttctggccagggcaatcaggcaagagaaagaaataacggtattcaaataggaaaaaaggaagtcaaattgtccctgtttgcagatgacatgattgtatatctagaaaaccccatcgtctcagcccaaaatctccttaagctgagaagcaacttcagcaaagtctcaggatacaaaaatcaatgtgcaaaaatcacaagcatttctatacaccaataacagacaaacagaaagtcaaatcataagtgaactcccattcacaattgctacaaagagaataaaatacctaggaatccaacttacaagggatgtgaaggacctcttcaaggagaacaataaactgctgctcaacaaaagaggacacaaacaaatggaagaacattccatgctcatggataggaagaatgaatatcatggaaatggccatactgcccaaggtaatttgtagattcaatgccatccccatcaagctaccaatgactttcttcacagaattggaaaaaaactactttaaagttcatattgaaccaaaaaagagcccgcattgccaaaacaatcctatgccaaaagaacaaagctggaggcatcacgctacctgacttcaaaccataatacaaggctacagtaaccaaaacagcatggcactggtaccaaaacagatatatagaacagaacagaggcctcagaaataacaccacacatctacaactgcctgatctttgacaaacctgacaaacacaataaatggggaaaggattccctatttaataaatggtgctggcaaaactggctagccacatgtagaaagctgaaactcgatcccttccttataccttatacaaaaattaattcaagatggattaaagacttaaatgttagacctaaaaccatcaaaaccctagaagaaaacctaggcaataccactcaggacataggcatggacaaggacttcatgactaaaacaccaaaagcaatggcaacaaaagccaaaatagacaaatgggatctaattaaacttaagagcttctgcacggcagaagaaactaccatcagagtgaacaggcagcctgcagaatgggagaaaatttttgcaatctacccatctgacaaagggctaatatccagaatctacaaagaacttaaacaaatttacaagaaaaagacaaccccatcaaaaagtgggtgaaggatatgaacagacacttctcaaaagaagacatttatgcagccaacagacacatgaaaaaatgctcatcatcattggtcatcagagaaatgcaaatcaaaaccacaatgagataccatctcacaccagttagaatggtgatcattaaaaagtcaggaaacaacaaatgctggagaggatgtggagaaataggaacgcttttgcactgttggtgggagtgtaaattggttcaaccattgtggaagacagtatggtgattcctcaaggatctagaactagaaatatcatttgacccagcaatccaactactggatatatacccaaaggattataaatcatgctactataaaaacacatgcacacatatgtttattgtggcactattgacaatagcaaagacttggaaccaacccaaatgtccatcaatgatagactggattaagaaaatgtggcacatatacatcacagaatactgtgcagccataaaaaaggatgagttcatgtccttttcagggacatggatgaagctggaaatcatcattctcagcacaccatcacaaggacagaaaaccaaacactgcatgttctcactcataggtgggaattgaacaatgagaacacttggacacagggcggggaacatcacacaccagggcctgtcagggggtgtggcagactgggggaggggtagcattaggagaaatacctcatgtaaatgacaagttggtgggtgcagcaaatcaacatggcacatgtatacctatgtaacaaacctgcacgttgtgcacgtgtaccctagaacttaaagtataaaaaaaagaaaatttaagaaaaactaaaaacactaaggaaatgtcttctctcttaaatatttcatttgcaaacttgttctcaaaattataattttaaaccagctaaaaacctccaattaggactaattagtgcttagggcaataaaactcatcattgtcagcggtaagaattcccaagtgtccaattacccaagacacagtcatagtgactcaggcaagcatgatccccatgccttagggagccaatgattaagacagagtgtccactttgaccagtaaatgggttcttttcaattatcaagtcattttcaaagatcctcacgcactatggcttgttattacaaagactggatgatgccaccactcaaatcgcagctactttcaaacataactaccattgtaaatgattatgggaggctggtgaggtgaagctcaagtccacagaaccaagaaaatccttagttcaaaacatcaccattaccctgaagatgattcctgcttgagtgaaggagaatttgaataaagcgtcccttccatgagtgtacgatatgtttatttcaaaacccctctgggatgaaatgatattatgcctgatgttttcttcagtattacttatggcttgtggcaggagggaagagaatgactgaagtatagaggcaataaaattggttatgggttaatcattgttaaagctctgtgatgagtacatgggattttactctatttttgtatgtttttgatttttttctaataacaagaagtaaatttaactagcatacggcataaaaagaggtaataacaaaactaggacttcagtttggtatcatgaaactgttttggtgtgcaagcttccaaggagcttgcaatgtcaaatgattgggcaacagatgcccaagttactacaatgcaaaaatgtagcccagactaaaataacacaaggacagctaatgcaagttgaacagttactgtatttaaggcactgttctgtgttttgcatgtattcattcaactaattctcgtagtaaccctctgaaataggtattatgattttccccttttggaaactgaggcacagagaggttaagttacttgtgcaaggttacagggctaataagaagtggaggcaggatttgatgccagtgggtcattggtctaggattttatctaaggcaataggtagagttgggagtagggaacgaatgtatcccagggcaaggatataatctggacaaagataggctggcggggaggtgcaggatatgttcaggaggtggtctggataactgctgtgggatttggaggctggtgcaggaggcagcattctaagaaggatccgcaagtgaggtggagcataaaagggttgaaaaagttgctaggagaaagaaataaattctgtggttgggtcagaaactgggccaggggcatagatgaggctcattctctcattacactcaagataatgctgctactctcagaagccccaatagcctggagcctggcacttgttgttggctggcataggacccagcatgagcctcccaccagctgtgcagacaccaaggcatcccacaggttcttcaggtgttttctgggcataggcaccaaatccgatgccccatctctgttcagcagagttggggctcttgagaaaggctggtgtcagcatgccctgaaactccagtatagggctgacatgctgagcagcgataggcttgttgctattaactattccagccacactgactgccacaaaggctagttacaatgcaggagcaattgcttcacaggaaaaggcagcggctgtccagcacgagattctcactgctgtgaaaatagaaaataaaatgcactataggggacactcaaagaagtaaaatgttccccttggttgggagactgagttcaatagcaacacatctctcctaggttttcctgacactttaaaccatcatctcataccctctgcatttactcattgttttcctttattaaactccacgccaagggtgctttaggaaaacaaacttcatacatatgcagaactgcttttagggaatgtgtatattagaatagcttgccttgtgctcgatttgcttttgttggattattcctgtttaagcagagcaagcgtatttattctactgtgaaccatttaataattacatgcagtatctgagctccagggatgtacttgaaatacagttaagacattttcaaaaagagtataattttctcttagcttgcaatgagcaaaatacatttgaccaaacaaaataataataatagtaactcaaattgtaaaaaggtagaaaatacacatttaatcagcatcagtaatgtgcaaaacagatataactgatttgctgagagctatcaggatttagcatcacattttttcccttgctggcactcaaaaaatattgactgactggttgatagatgagtggcatacctttcaaccatgccaagatgttgagtggccttgacatctgtccattgtcaagctgcctgctgctctcaaggtctgcagcccacgttttgtcaataatcttgcagccctgctcattttaggtcaatgtttggtgatgcattgcagatctgtattccattactgtgctgttgtccataaaaatctctcttgcatagcatttctttgacaggtgttcactactgaaatgtcatccctgccattgacgatatttatgaagcattggggacgcagcatactctatctattaaaccctaaacagtgagagattctaggttagatgcaattcttggctgcagaaagtttactataaattcaggaagagagaagacatttattactcaagcaaacaaaatggagggaaggaagatggataaatggaggctgaagaacatttatctctttgtgagccaatgtgattgatagcattagttaaaccttcaaataagaaaggttttctgggattaacttttattttcttattaaaagtcatacttcattctgaagaaccccaagcaacaggccacaaaaaagtgtgagaaaaaaggccctctctggttggctattttcacactgatgtaagctgataccttaccctggtgatacttaatggtttgggagtagatgaacatctttcccttatgtctttatgaactaattctgaaacacctcctggataataaaatgcaaactgttttcaaagacatagtctttttcatgtgagctttaagactacctcatcagtcgatattagctcaaaggttactgcttgtaaccaaccctttctacatccaaaccagagcacagtgaaatccaacagcatttaatttttaaatttctagtcccctacctggattagaaaagtatttattatttaaatttttccttcagctaaaaggagtagatgtaatatagatttaggggttatggagaaaattataaagatggtaaaagaaagacctatatttgggtataattagttctactttgtaagctaatgtgtacatgccatatagagattttatggtactcagacggcaatcaataactcttttcttaagagagagaaatacagcacattatgtagacaaatgtaatattatgttaattgcttggtatggaatgagtgatccctgaatcagttcccttatctataaacagggactaaagctcccaccttgaaggcttgtactgcggattcaagacaggtatagagtgcttggtacagagcatggcacatggtaagcactccctaaccgacaaccaatagagttgtgaaattcagcaaagagatttctacaggagctaagtcaaagattattcaacgacaaagaaaagtaggagaatttatgctacaggagtaaatgtagcattcacccacctttctcagacatctgctctctcatttaagcttttgacagaaactggataacagtcagctcaaggttaaactctctgtcaagattctagtgcctgtgtttctgcattgctgattgaaaaaggagttatagccaaagataccttgtatgcatgaaacaaagttgatctattaggaaatttgaaatgtctagcatctggcctcagaaagatgaggagtctgctcacttctccagaaagcaatgggtgcttgccagcagactcagggacttccccagaggcagctttgctcattctcacctgtcacctattctaacctattctgcctgagctattcatttctcatctattctatcaagtaggctcttgaaaccccaaagtcttaccctgtagagctcattggacattagccagcaaacgtggtcgacgccaaactagccaggaagtctctgcatttcagttctaatatgtctaacactggagcttctttctccaaagccaagggtgaaaagactgcagctggccaccatgggtcttctgttgtctaagaatctgtagatgcagagagactggagaccagaagacaaagacagcctcatgtgcatgaacttagccaagttgcacactggcttgctgactaatctgtcttatctccttatctctgtgaatgcagatccctgaaacactgttgtagaaactggttgtcagaaacagaactaaggagtcaattgaaacaatcataggaccagtagccaggaaaggaagagaggtaaaaaaaaaaaaaaaaaaaaaaaaaaaaaaagacgaaaaaatatctccacatcaaaattatcctaaaatccactattccaaaatgcctgaaaaaaatacacctaaaaaaactaaaaatcaggatattaatttgtactatatgaaatcggttctatgaagcagtcttgaaaaagactttatcataagttatttttagtttgttcagagtgataaatgcatgggtgacatacattttaaagaaaactaaatgatggtggaaacataggcaaaaacaaaagcatggacatgaaaagaaccaattgcagctgaaaaatacagcctgtggaataaaatctcaataaatggtataaaatctagcctggatgcacttgaggagttaattatcgaattgaagataacagcctgtttatcaaaaacctacagcaaacattattcttcatggtgaagctttgatagcattctctaagtctgacaagatgtgggttctccctatcatccctttaattcaacactatgctacatttcatagctgatcaaatagttataaatctaagaaaaggtgtgagatcattaagaagaaaattataaaatttacaaaagaataaaggagtcctaaataaatagagtggcatactaagctcagggataagaagatggaacaatataaagatatcatatcaaattaatatattaattcattgcaatttcaattaaagtttcaatagattattcagtggaactagacaaaattgttttaaaattgatatggaaaaacaagtggccaaaatagaagaagacaagtaaggaggaggaaaaaaggagaaaaaagaggaagagaatgaagataaagaagaagaagatgaggttgaagttcagcaacaacagaacaacagcaagatgggaagctttgccgaccggataccaaaacattacacaaccataataatatgagattgtagggttagcatacagagagacaaaaagatcaagaaacagaatagagagtgcaaaaacagacaccacataaaaggaaccctaatatatgattaagatagcaataaaaacaataaggaaatgatggagtgaaggtattcaataaatgtgataactatgcacatggggagaaataggcacccacaccacatactgagcataaataaattccaggagaatgaaagacctaaatggatataaatcttttaggaaaaaataaagaaaaacatctttatgatcatgacatagggactgatttcttcccttttctccccaattgatttagaagtttattttgccaaggttaagggtcatgacccatgacacagcctcaggaggtcctgagaacaggtgcccaaggtggttgagtcagagcttgattttatatgttttagggagacataagacattaatcaatacatgtgaagtagacattggcttggtctggaaaggcaggacatcttgaagcaggggcttccaggttataggtagattcaaagattttctgattggcaattggttgaattattacctaaagacctggaatcaatagaaaggtgtgtctgggttaagataagggtttgtggagaccagggttctttttatgtagatgaatctcctaagtggccactcttagaggcaatagatgacagatgattcctgttcagacctttaaaaggtgctagactctcagctaatctctccaggattggaaaaagatctggaaagggcagaggattctctacagaatgtaaattagggatggatttcttaagccactaaaccacatggaaaaataaatgattaataaagctggctacattaaaattaaacacttttgtacaaaaaaaaaagtcacaataaataaatttggaagacaagccacagactagaagacgtgcagcaaattttatggaaaaaaaggcttaatatagaaaatttgtaaagaacagctacaaatcaatgaaaaataaataaatacccttgtagaagaaatgggccaaggttattaacaggaaattcacagaaaagaaaatctaagccaaatagcctatgaaaagattaccttgctagtgatgaggaaatgcaaaatgaaacaataacataccatttcacaccaactggactagcaaaaatggtaacattcaacaatgatcaatgttgaaaaggattgagcaacaggattgctcacaccttgaaggaggtagtacatagccatataacctgttttaaatcctacaagaagacctcagagaaactattccttatgggtacatggaaataataaacaagaatgtttcttttcaaattatttgtaatagcaagcaaattgcaaacaaattaaatacctatcattagaagtataaataaataaatcacagcatatttataaatggactactacacagcactaaaaatggatgaactagaattcacaagttaacttcagaaaatgtagcaaatgaagccaattttacatagatcatacactaggaaattttatacagtttgaaacatgcaaagagtgacatgtatgcttatgcatacctgattataagttcataaaaatgttctgaacagcaaatttagtacacttgttacctctgaggaagcaaagaggggaaggaatggcatcagagagggcctcaaattgtatctgtaaagatttatgttgtttcttggcgcggagggggttgttttttgttttttgagacagagtctcactctgtcgcccaggctggagtgcagtggctccgtctcggctcactgtgacctccgcctctctggttcatgcgattctcctgcctcagcctcctgagtagctgagattacaggcacgcgccaccacgcctggctaatttttgtatttttagtagagacagggtttcaccatgttggtcaggctggtctcaaactcctgacctcgtgatctacccacctcagcctcccaaagtgctgggattacaggcgtgagccacagcgcccagccttttatttttatttgagacagtctcattctgtcacccaggctggagtgcagtggcgtaatcttggcacactgtaacctccgactcctaggttcaagcaattctcatgtctcagcctcccgagtagctagaactacagagacaggccaccatacctggctaatttttttgtgtttttagtagagacggggtttccaggctggtcttgaactcctgatctcaagcaatacgcccaccttggcctcccaaagtgctgggattacaggagtgagccaccacacccagcctataaagaattatgtttttctaaaaataatccaaagtaagaaaaatgtttggctttgatagacttggatggtggctatatgagagtcatcatactattcactgaaattgtctatatttttttaaatatttcataatttcacatatttaaataataagcctgagccaaaatggaaaccccaaagtgtcagacaggcccattcaccattaaaagacccacttctacacaccagcctcaaagtgcgcattaaataaacgaatgccaaaagtccatcatgcaccctgcacacacctagtgagagggtaggggaattcgaccactagacaaggcagccattttttttctgttcatcaaagactgctttgtactgatccttgtcacccaacatctctttttgtgggatccttcaaattagtttatgtcacttattattagaatttatccttccaaaacagtttatcgagtaggatctaataaaattataggaataatcaataggaataagattaaaatgtgctagttcatgttatcctagtagctgtaacaaataaatcttggccctgaaatattagtggcttagcggcttagcaccaaaagaagtgtatcactcacccaccagtccatctctgtgttcctggtggagcagctctcctctaagcagtgattaggggatgcagactcctttcatctttggcataggtttccaatgttcctgggcttttttgcatcaaactacttgaggggaaagagagtgaataattgcccaagggtaatttttatgggccaggttaacaaatagcatttacccatctgctcacatatttgccataactcagtcacatggccacatacaagtgcaagggaggatgggagccttactgcagcctggggagaaaagagaatgactggtgaccatttagcattttctgccaccaacaaaaaccatgttacagagtgagagacaatactgtaccagaatacctagttgaatggtgatatggtttgactctgtgtctccactgaaatctcatcttgaattgtaattgccataatccccatgtgtcaagggcaagaccaggtggaggtaactgaatcatggggtcagtttcccccatgcggttctcatgataatgagtgagtcttacaagatctgatggttttataagcatctggcatttcccctgctggcactcatttactccttcctgccaccctgtgaagaggtgccttccaccatgattttaagtttcctaaggcctcccaagcaatgctgaactgtaagtcaattaaccctctttcctttataaattacccagtctctggtatttcttcatagcagtgtgaaaacagactaatatgggtattagcaaatgactgaactaagaaaccagcaaaagcagatttaattacttagttactttttgttttagtcatggttctccagagaacagaaccagtaggatgtgtatacatataaaaagaggttcattataaggaattggctcacctaagtctggagactggcaagtccaaaatctgcagggtgagccagcaggctggagaccctgagagccaatggtccagcttgagtctgaaggtagcctgctatagaaccaggaagatccaacgttacaggtgaagtccaaagacagtcttccagagaattctctcttctcagagaaggccagatcttttgtctatttaaaccttcaagtgattggatgaggcccacgcacattatggaggacaagctgctctagtcaatgtccacaaattgaaatgtgagtctcatccaaaatacccttgcagcaacacctagaataatgtctgactgaatgtctggatacctcgtggcccagccatattgacaaatgaaattaaccgttacaattttaatctgcatgtttctaataggattacatgatagttaaagatcatggttaagagcagggctttggaagcagcagacctgagtttgaattcttgtcctgcctcctatttgagaagtgacttcacatctatctaagcttcagttttctcatctttaaaatggggataataataggctgttgtgaggatttaataggataatacatgtaactctctcagcacagggcccatctcatagtaggtgctggtaaaagaggttgttttattcatattgctggatatatctaacactattccctaagtgtagtacatatataaatacatgcttttggctggaaaaactaagtgagatgatcaaatcactctgatggaaaagccagcagtgtggatggaaaaggtgtgcctgttctttctctcaggaaatccacagggttgcgcacagggcctcaggttttcatttggacaccccagcagcccctcaatacaggctattcacaaaagccccaatacagtcaccctgacagtccagctgtgaaccctggctccccacacgtgagccatggtgtccctctagccttgttcattcattgtgtcagtaatctactgccatgataacgctgcataacaaattattccagaattcagtagcttgaaacaataagcattgattattgctcccaagtctatagtttggctggaaagttctattgatctggaccaggctaggcttgtcttggctgagctcacccttgtctccctggtcagctggcaggttgctgggggctgattggtttaggatgacctcactcacatgttgatggattactgttgactggggtgtcaggcattacaggttatgtgtctttcatcatccaataggctagcccgggcttactcacatggagcctagacagggtggcaagagaaagcagaaaagccacatggtctcctgaggcccaggctcatcacttctgccacattctttcagtcaaaataaatgacaagagaagtccagattcaaaagcccagggttgtgagaaggcttggtgttaggaacaatcgtaagaaacctctatttatggctgattgctaattagtgttgcctaatttagcaatgaaatgtttcttcccatatgttcctctggagagcccatggcattcctctcccccgcttaagggccaaaattaagatacagaagacttatttaatatctttactttgttcaagctggttcacatacacttgtcctccagcctttggtgaactgttttaggacagggacaggtttaacacaagggccgacctctgcagtgacactgggtttacatatctgggtacatgataggcgggtttcattcttgttccaaagagaattttgaggcatgaaatatgtagcctttatggaggcaggatttactttgactcatacagagaaagaaaatgtgtgtgtgtgtgtgtgtattttcaatccttgcatgtgatatttttaagggctggtgcgatagctttgcttgccccaagaggatgtcccagacagtgcactagttgatgctgcagaaatggaaaattcctagggatatgtagccaatgaaccccttcacccacatttcctgattgtttgccacaatttgaacagtgagtggaaagaccttgtgcattccgcaggccatactcgcactgtcccagcagacctgggaatgtgcccatttgattcagtagttgttccacccaccattaaaatggacttttctagccacactcagcagctcacagctgtaatcccagcaatgtgggaggcttagatgggaagatcgcttgagcccaggagtttgagaccagcctgggcaacatgggaaacccccttctctacaaaaaatacaaaaaattagccaggcgtggtgcacacacctgtggtcccagctactgaagaggctgaggcaagagaatcacctgagcccaggaagtcgaagctgcagtaagccaagattgcaccactgcattccagcctgggtgaccgaggagactctgtctcaaaaaaaaaaaaaaaaaaaaaaaaaaaaaaaagaataaataaatataaataaagtggacttttcatggttggatctggtagttccagatgatttgtaccattggaatcttttgcatcttgaatgctgtttgggtctgaaaacacagccttctcagtgattcagcttatacttgttttatttctctattgcggctttacaaaccaccccaaaatggggcgctttacagaaaactaaaagacaggtagataatggtttgctcagcactttaagtcttcacagaactttaacacaagggctgacctcttcagtgacacagggtttacttgtatatgatacgcagatttcatttttgttccaaagagaattttgagcccatgagagatctagccaaattcgtttcactgcatatctaatgtgtctttatatttttccaaagccacgggacccgatgtgcaggagaagtttctgctgccgccaacaacaatatctgtggagttggagtagcatacaactccaaggttgcaggtaagccatccctgccaaacagaggcccccactaggtatcacactgatctcaaggctgactgtggcccagcaaaaaatcccactggtgcagaaaagctaggatccacagatttggcacaagtgaaaaaaatttttttcttttaacctgcataacaatatcaatagttttaaatttttaatttaagcataatataaattcaaaaaagttaacaaatcataaataagctaatgacttttcccaaactggccatacccatacagtgatcaggaaacaaaatgtaaccagcaccccaaacatgtccccttccagttactactctgacacccaagaataatcatgatcttgttttttaacagcaaaaaaaaaatggttattgccagtttttgaaatttatataaatagaattgtcagtcactactcttctgtgtcagtgtcaataacattttaatgagtctcaaatatagactatagaatacaaggtggtgtgtataaattatttgtaaacatactcagagctcttcaaaatgttttgcacaatggaactcatctttaaaaagagaaattctgcctagaacctttttcttacatttcattgggtaggatatttaagaatttcctattgatggagcctttagaaataagagtggcaagtcactggaaatttagaacccaatatccctcccctctcagaaaaaaaaagagagagagacacagacagagacagagactgagagattcataagctttcaacgagatgtctgagaatggagtggcaccagtctttttccaagttttgcatcaaattgattcttaatttattcaggctgagtcacccaaccttgtttttcttttttcttttcttttttgtttacaactgtcctgatattttcttttcctggcaatttaatggaaccataaacctactttctgctgacactccatttccatggaactaaataaagcaaaggtaacctatacaaacccactattaacctcttttcaacactgtttgctaagaggcttgcctgaactgggtgctgaatgtcacaaaagaatacatctggaggtttctaaaatgtaaatagaggaggcttagcccctgggtttcagctctctttactttgtgcacatccaaaatgctggcattaaaatgtcaggagccattatgagctcaggggaaagaatatcactcggttaatattttataagccaggctcagacctgggatggaatctaagggaggcgggttctctactcacaggacagaactggaagcaactgaaaaattcaaacctgaatttcttgttcacacacccaaggtaactggtttttggaacaaagtaaaatgaccacctgcaaaagttaaaagagttagggggagctcacagctttctggaggttcctgggagcttctttttccatctccttcttttccttttttcctcttctcttattatttgcactctgaaaacacctgagcattgagtgctcatcaaatgtatctaattctcctgctgtcttagtttgctctgcctaaaagcaaaacctgagacaaggattccgggcaagcagttaatgtgggaggtggtccccggaagccagagtgagggagttggggaagaagacaggaaaggaatggaggccaacgaagtgagtctcatggacaacaggggccccgtcctgcaggtaattctctgaggaagtgtggagaacacccctcagaattgaccccgctaatgtgaggaggctgcggcattaatctgccagttcccatctttcattgttcgggggtgccgtcgggcctgtccagcctgcccagctcgcttgaactgagtggagctccttgagcagaggacacccccaggcaaaaagccagggagcaggccagaggacccggtgggtgcagcagcctctgcctcgcctgctgaatgcagcctgacacctcaaagacgcgactgggcttctgtgaagcccaatgacagctagggcatcacagcaacgttttgaggttccagaaaccaagaacagacatccaaagattttgagcaagggaggctcctttctttcttttcccactcccttagccccagcttggctcccctgtgaccacgtacgctggttctaactacaagggctgcgaggctccagtcccatgcctgtgccttagggaacccagtgtcctctggctccctggggcgtcagcatgaattcttgaggaagcactggggaattactcatggattacaaaaacagcagagtttatcttacaaatttaaggaaaacattttattcatcctggctggcaattccaaaagttggctggtttttaattatttgctaaaaatgagccaaaccctccagagaatctttccattcgggagctttctgggctaaggaggtctaaagcgccacctggtggccaactcggatcgttgctggtctcaaagtcgaggtgttcgttcgttacaggttaggggggcgcccctgtgatgtctgaggtccttccccagcacccctccacgctgtctccagaaaaagcccaaagttaaaatgtggttgaatcttaacccagggattcaaaaaagaagagtggagattgtaaattgagtcctctgaacagaagagagcattgagcatctctgcatctacctgagttcctcttctgttcataaatttttctcatttttccatcaaggctcctgtctttttcttgttgatttgtaggcattcttggtgtgtcccaaaggttagcccctaacccattttaatcaatgcaaagatcttctccttcatttctcttcgcgtccgtcttcatttcaaactccgtgacatgtagacccgcacatacgggatgtcccaaaagtcatcctgcagtcttcaagctttaataaccccaggaacattatttgaaagtttatttacatttccattttcactgatttaattgtataaattttgaagaaaaatattactttttttattttgaaaatgcctttattcaagtaactgtcttttttaaaaaggaccccattctttccttctttcttttttcattttaatttttaagtaaacaacatcttcaatcaaaaagattgagtcaaaaattaaaattaagtgtgttattcaaaatccacaaaaccaagcaaatgtaccacaaacaatgaccttccaaatgatggtttttgcaaatttgtcaaatgtatatttctgaaaatattaaagctcgagaccacatcaaggagtcgtaacactgtctcctgccttcaggccttttgtgtggtccatagttactgtgggcaccttcctgttgcaggggatggaagctggcggacaggtcccctgccccatatagctcacagtctaggaggagaaaaagacagggagcaaataaaaaaaaatcagataacaactcatgaaagaggacagagagtaaccagggctcagggacaagaggcgcctgagggtggggctctacagttcctcactgttctggatttctgcagagactctcagagcagccctaagagggggccaggccaggtgggtttggtcctattcaccttcctttttaaaccaaagcacacagatttacacaccgggcttcgggatgagatcacctttgattgaagattttgaaaaatatttaaaaaccacactgttgaccattgtgaaaatgccgtgaaatttctctaccagctatgaagtgctttcacatattattatcactattattattggccaatgaatctcataacactgcagataaacatattttatctgagcttttcaataaacaagtaaaaatcactgtaagtacaatgactaacatgagttttcagaacctaaaacctggatgagcatgaatttcctccttatcatccagagctaatattcatgagcacaaaaagtggcattgatgagcaccgaagtttgtgggcagatgtagtatttactggaggcagggacaggcacaccttgtgcaacaggagcagaggcagagagggtgcagctcaaatcccctggacatgcagcccccggggcaccagggctagccacagtgcatgctgcacaggcagacagagaaggctctaaatgaatggaagagacccacagagtcacctctactcattaatgtgctgtgcaggcctgcctggggtcagatagaaacacttgatgtgtgcctgtgtctgttcttgcccatcaaatacacatatcagcattgttagggatgtgaagacacagactcctagctcctttgatttctctctctctctctctctctctctctccccccacttccttccctcctcctcctcccccccttcctccctctctccctctctctcttcctcccctcctcctcccccccccttcctacttctctccctttcctctctctttccctctcctctccctctctctctaccttctctctcctacactctccctctctccctctcctctctccctgtcctctccctctctctctaccttctctctctctcctacactctccctctctccctctcctctctctctgtcctctccttctctctctaccttctctctctctcccactctctccttctcctctccctttctctctacctgttctccctctgcctctctctatcccattctctttgtctctctccctctatctacgctctctctctctctctctcccagtctgtctgcctctctccctctctctctccttctctccctctctctcactcggtctactctctgtctccaccccacattcccctgtagctcctagagcatccaggggcagaggagaggccttccctaaaaacccttgggtcacgctgagcctctgtcttggcttggtgcagttgcttgcaaaattaatactgtatctcattcaattaatgcatgcctcattcctcttgagcttaacaagattaaaagaatgtcgggtgcctggtccctgaatatgaatgagagacttgctctcagcctgtggccaccctataatgttaaaacagtcagaagattaatacacatccactctgaggttcttgcgcagcacagagggagcccatgaaggtgataagagctgcaaagaggaagagggttcaaggcacagctggaagtgccatgcaccagccctggcaaaatccagggctggcattcgttggtttgtggggcagcagaaacctgctttggccggggttgaatttctcaccttccagttgagtgggccattcagtcctggtcatcttggcactaggcaagttcaagagcatctgagcaagtgaacgccagcctctgtctatttcccacccacagagtgggcgtgactttgcacaagaagaagctgcactgaccagtttattctgtggttcattggtcacctgcattaaataaagtttttaaataaataaaaacataggtggaccaaaagcaaaatacagagtcttaaatttcctatctccttataaaatgaaccataaaatttaacatctggaaagttcaaaccaaagactaggcttattctagataatcttcctccaggagaaagaatgctaactgataactgggtgtttgttgtcaaaaatggtgattacacttatgggttaatagtagaagatggataagcagagcctgttattcattcttctggacctgttatttgtgttggggagaaaatcaactaaataaggtaataatgccagatatttattcaccaaatatttgtcaagcttaaaataaataccaagcatcatgttgatcctcaaggacatggaagtgaacaaaatagacacatgccctatactcaaagaccatgccatctggtggtatatgaaacacgcaaataagtagttgcgatagaaggttaaaggtacacaagaagagggctatgagcactgaagaggaaagtgagatcctcgagtctcctgaggactgaaagtagtagtccctcaggaaagaaagcaatttcatgtccatttcagctgcctggcaaggacctgggtggcttttaattcgattgacgtgctcgccatgttagagagtgaggcttgtgaaatagtgtccttcaggcacaacatcctttggccaccggggacaaggaaggagttttggggcccagattttgactgtgcatggcccaaccccttcattccataatcgcagtgggtggaaagactcaggtcagcttcactagcactctaagctccatgccacagaattgtgaacccactgacccatccagatgacaaagcctggagagaggcatgtgaccccgtcagcgaagttttgagggtagtgatggagagacagcacacccaacccaatggcggctactgagatccccctggagaggcctttgtggatggccaaacggggaccggaggcctaggagcaccagctctgcgggggcagcgccagcaccttcaccctgtgcccctgtgtcttaggattgtgtgtcccacactatcctggactgcaggactttgctccttcccaacattctgtgagaaatcactcccacgaggcatcagagaggaacacaaactttacagcgatgctatagggaagaaaggagaggcagccgtcagacacagaattactaatacagtttagaatagccatctctgcctttctgtcctctccgaagtccctctcagctacagtgcaaatgggagttcctctttcctgaccccacccgctcctgcactgcccctgcccctctctctgtcccctgccctctgccctctgcctgctggaatttctcctcaaatatcaaatattgattgcctcccccatctatcatatgtagtagctttatttctcccttaaaacttggctgcagccaacacccagttctctgaggccaagcttctacttagaaacgagcttatcaaagcatcgcttcagcaaaggtggtctctcccatcatgaattctagtaagttttgctaggggaataaaattgtctttaaatcattacatcagcaaagatgtgggtgggatgcagaaaggagccagtaggaccgtctgtgcctctttcttgatccctggactgcacagtggccccagagcacctgagatctccaaccattccaagtacccagggcccaagccctcctccacctccttgtctcctgcgaactggggaacccaaacatggtgtcctctgctcaacgtgtccacaggcatccggatgctggaccagccattcatgacagacatcatcgaggcctcctccatcagtcatatgccacagctgattgacatctacagcgccagctggggccccacagacaacggcaagacagtggatgggccccgggagctcacgctgcaggccatggccgatggcgtgaacaaggtaagggggccggccccctaggccccggccactcacaagttgggacaaagtgggtggaggggtagatgcaactgggtgaaccactgtcaccctgtgtgtgagtccaggtcctgcaggaatcagacagcacaggggcttagccatgcaggaggctgactgcagggaggcctgtgatggataaggagagagggcagaaaagcctcagacgcgatgcctacctggctcctgcaaacgacagtgggaaggaaggggccgggggggggagggtctcagacagcagtccccacgccaaagctgcccatcacagacagaaaggggcctgcactggcacccccaccacccactcagtcgttggctggcagtagcacacaggattttgggtctcggcgcacacagggcggtagatccaggaggcagcagccaagactatgaccacaatgctcgtggggcagggggtctgagcatgcattctcacagctgctcctctgagattagcccaggcttggacagagctgaggagaaggaagctgggcagagcctccaaagggatgagatgcaggtcagtgctgcatagggaggggaagggggccccttctctgagacgctggggctggagccaccccagaggagacatgaccccaggctcagggaccagaggatttctgggctccagtctatcaggaagtgacttagcctcgcctgtaaaacggtgataatgaggggtcactatgatgtataaatgagataaagatgcaactgctcggcactgagaagtgcctgcaaagagtcagaatttgtcccagtctcgactgccgcttaagcaaccaccccaaaacttcatagcacagaacacaactcctttactacgcttgggatgctctgggtcaggaatttggaccgggcacactggggatggctcatccgtcctccatgattcctggggcctcagccgatagattcgttacttgagcatccattaccaaactgttgcgtcttcatgagctgttctgatgcatccatctacttgccacgcgtggcacagctcccacccctaggcttacgcagtcttctcaggcctgtcctggctgccaggccagcagttcccccccacccacaccgtgctcccagaggactctctgtaatcagcctggacgtgggactcacaccacaaggtcactgccgtgtgtggagtgagttgtctggtgttaagtgagggaaaggacagtgtgtgagattttgtgtgtggcttttggaactccattttgggaatgtttttaaatttgcttcttagattttggtaaatttcaaatagatgaaatggctatagaaaccagcactattataaatattttataaaatgcatctgctccacatacacatttaagttatgtacagtctgtttatggaaaatgcataaactcattacttatacattgataacactaaaataagtgaatgtacagaacgctatgtttaacgcaggcataaaaaagagaatattgaagaaaataagagtgggcaattgaaggctgcttttccatacatttcttgaggtcagaaaacatgtgttttcctgcccagaccatcctcaggaactggcccggggtttgagaacatagtggatgagctgttcagggggcaggtatggaattaatgcagacacgaaatggtacggttgagaggctgaaagtcacatcgaaatctatgactacaatggatgccattggtgcccaccaagatcccctttaccaggcctgggggccaccccagctgctgtgagtgttggctgctgatggctcacagtgggccctctcacgaagcattgccttgacgatggaatcttctctcccagaaagttatgccccccacacccagggcacagcccacagccgatgactaaggcaggagcctgtttgcctccaacagggaggagtcttcaatgcaatttatggtccagagccccctgtgggccaggccaagggaaagctttacccaagactacatagttttggagttccttcccctctgtatcttacttcacttccttgctcgcaggttgctcctgagagccctccctcaatgagtctggggcagccgaatctctgcctcaggctctgcttctagggaacacctcccacaaacactgcctcaaaatttaccccattaggtttccctttttcctttggctgccaggaagcttagaactaagtgtgtgcctattaccattggttttttagactaggttttcttctaccttttttttttcttttgagatagggtctcactgcatcacccaggctggagtgcagtggcacaatctcagctcactgcagcctcaacctcctgggctcaagtgattctcctgcctcagcctccagagtggctgggactacaggtgcatgataccatgcccagctaactttttgtagacatgtttcaccatgttgcccaggctagtttcaaactccgggactcaagagatcctcccaccttggcctcccgaggtgggattacaagcatgcaccactgcacccggcctcttccaccccatttttctccatctcttcaccactcacagcctccaaaatcatcccttagcttctgtccctgtgtccgtgtttgtattcctagtgagtctaagcctctgaatgctaggcaatgtaaaatttgtaaaagaattgatgaaatgagctcagtctgattagattatatttagccatgagaaatctaactttggatccttactaaattgttgcttgcttacacacattcctagtcttaccagactaaagcatctcactggacaaaaattggcaagttcacatgtaacttcctcagagtctcagccctaaacaatagtaaacaatatttcaaaccaagtggaacccttcagcgcagtgggtggccaactttggtacacaggctggatctaacccccagacttgctttgcaaagacagtttccttgggacacagccaggcccttccaggtctttgtgacattctgggcacctccaaccacagctgtcacgggtcccaggggaaggaagcacatagggcaccaaatgaaggggctcatctctcagaatcaggcttttctggatgctggtcaacgtctctgtcttcactagagagccgacactgcacagcagcaggtccgtcctgttgcagggatatttcagcaggtggagagctcttgacagtggagagacctgagttttaacctcagtcctgccccccattggctggggaacttcagactagtcgatgtctccattcctcactttttgcaaaatggtctgagtcagtgcttctcaaagtgtggccacagcccacctgggagagtgaaaaatgcaaaacctcagcgcctcctcccctcccacagatgccgcattttaacaagatcccattaaagtttgcaaggtgttgctctacgtgatcttgaggatccaaatcatctaaccctgagatcctaagaccctaacatatggtttcttaaaacctacaatgaatagaaaagggcagcaggggtgacacatttccagaaaggaacagccctgtatttcctcatcagacaatgggttggacgggtgggctgtgtgatgactgagccacacgccatttgtctctgtgttgaagaaacagaggcctaggtagcccaaataaattggtttctcgtaagaatgcaccaggagggccttggcatagtggctcacgcctgtaatcccaacactttggggggctaaggcgggtggatcacctgaggtcaggagttcaagaccagcctgatcaaaatggtgaaaccccgtctctactaaagatacaaaaaattagccaggtgtggtggtgggcacctgtaatctcagttactcaagaggctgaggcaggagaatcacttgaacccgggaggcagacgttgcagtgagctgagttcatgccattgcactccagtctgggcatcaggagtgaaactctatctcaaaaaaaaaaaaaaaaatgcaccaagagggatcagggcaatgagatagattcaggcaagacctcatagtgcctgggaccagacagacatcctgatccaaggtggctgcaggatgccagccccaagaatgtgtggaaagccacaggagggctctgcggtcacggggctaggccacactcaccctgtttgcttctccccggtttcgtggctccggctctccaactcacccttccccttccttgaggcttatgcttagaggtgtttccacttggacaccaccccattggcacccttgcttgttacaatctgtcagcctctgctccagctgccacctgcccttgatgctttcagggaaattttggctcaaaattaggggaaacaccccaagatgagcctccaaaaccaagaagtgtggttctgttgggaaggtttggaacttgcagggtcagaggccagtcagatggtttctaataaaacccctttctttctcctctgaggacatcaaagggtagttgtctatattcacagtcttcttaggcatctgatggagtaattttttctgagctgttgaattctttcaaaggtctgaacagaaatataagactgtatgcccctgtattaatctgttttcatgctgttggtaaagacatacctaaggctgggcaatttacaaaagaaagaggtttattggacttacagttccacatagctggggagacctcacaatcatggtggaaggtgaaaggcatgtcttacctggtggcagacaagagaagagagcttctgtagggaaactcccctttttaaaaccatgagatctcatgagatctcataagacttattcactatcaagagaacagcatggggaagactcgcccccatgattcagttacctcccactgggtccttcccacaacatgtggaaattcaagatgagatttgggtgggggcacagccaaacggcatcagcacctcttctgttgtgggttcaattgtgtccccaaatattcatatgttggggtcctaatccccaatacctcataatgtgaccttatttggaaatagggtcattgcagatataattaattaagatgatgtcatattggagtaggatgggcccctaatccaatatgattggtgtccttatttaaaagacaaaaaaaaaaaaaaagaacaggaacatctgggcacagataggcatacagggagaacagcatgtgaagatgaaggcagaggggctggggatgcatctacaagcccaggagagccagagatggccaacagcccaccgggagctgggaaaggaatgggatagattccttctccagaacttctaggaatggaattgaatctattatgtctccagaacttctagagatggattctattcctagaagttctggagacggaagtgtcagcagggttggctgacacttccgtctccaggatttctaggcaagaaatttctgttgtttaagccactcagtttgtggtcctttggttgttactttggtcctttggttgtggtccttctgtagcagccctggcaaactaatgcaccttccagtcttagaatggatcatcaaaaaggaggtttggcagtgcgggaatgacctgctcactgttcaaggtcaccttgatgtcacctggccctctgctttacagccaagatggtcaatagttgatccaattacgacttttttcttctagttcaggaccttgagaagtctccctccctcccttctctgatgtagcttcctcgaaggaatgagcgtgtgaaaatgctcacgatgcagtcctaggagagaaacatgtttccaagttagggagagtgctgtgctgaaatgctcccaataacgtcacactgggagcttgaaattcaacatggaaattgacgaacactaaaaataaagcccttttacgcccccttcagggagctggttgttaaacattgaatagcacacctctcgttagaggactcttctgacttcccttaaattatagcacttacatacctatgtgttctccctgcaagtaacagccacccttgccttcatgagtctggaagttccctttgcgaagtggaaaagctggaggaaaaacacctgaaaccccaaggttttgtttccccaaaatgacaagtttcccaaccagagtcctaagttaccccaagactgtggaggacaacttttctaagtcaaggaaagatctcacactttaaggaattcaccacttttacattaaatacaaggatcccaaaaacacaattatgagatgggaaacagagtcctcgaagtgaacatcatggtgacagcagctaaatgtccattgctacactgttcaggaaatagtgaagacgctttattacaaggttatgccagtctgctgttgaaattcaacccatctgaaacagcaacaggagcctgacatttgagtgacacaatgcggtttacagagaatgtctgccaacaggatcgggtggcaggaaagtgacgtccctaccctgtttcaatgcctggtctccttaagaagcatttaggatgaaatttttgatgcacagacagcctgtttccttattgcattattcattgtgtgactggagagaaattgttacacatccaagccccagaccaggtgacagcaggtgcccaggggaacagttggcagattccccctttcctcagcagacatggattttcactgagaggcactttttttgacacctgaggccaaaagagagtcgggaaggtaggagatgtgtgccctctgtccagactgacagtgcagatggtggcagcgctccacatccctgggtgcccctgtcattttccacggacttctgcacttctccactgcctctcgaagcaggatatttctctctcctccatctgtagcctccctggctgcaggtgaaaaggccctttcaagtgtgattgtcctgcaaagcatgccgagcccgctgaagcttaagagaaaaattgttatgactgatcttcagatgacagcaagtacatcttttagaaagtggagtgagtatgatgaaaaatacattatttcacatttgacttttccccaagaaatgggaataaatttccccaagcaatgggaataaatttccccaagcagtgggaataaatctttccttgtttcaaggtgacattttttggacaacattgtagcattttggaagtgagggttcattgtgcattagcgaaggttttctcctagtgacttccactgcctggtctactctaaggaaaaatccacttctgaaaggcaatcttcacacaaacaaaggagtcagagaattacctgttacacaaggcacttcttacgtttgtctttcaattttatcatcctgtacatatgttttgtttgaccaacatggtaatgattaaaaggaagagaacaaagaggagatggataagagacttttatcggggcatgcactgtttgccatagatcccaccattcccagttgtctgatggctgcttcacacaaacatcacctacctgactccttagggatttgaagtttgcacctcctacatttgcttagtaaatacttgagagaagcagtgaggagtgggcaagaaggaaatcctttttttcttttgcttagtagtctatgtgttgggtttacagttacagcatttttcacgttgtatatgggaagagggtgacagtcagaggcccctgaattaccagagggttcaataattgacttctgtcttagttttagatctcctagaagcagatcctgaggcaagatttgggatcaagtagtttattgggaaggtgaagagaataccagtgatgaatgggaggtgtggcaggaaagagacagggccagttaagggtatgttatcctgccagtcatcgctgtcagcaactggagcttaatgccactgggaaacttcagaaaaccacaccaaaacttgagaacacaccccaaaggtatcccaccctgtgggaaaggagctggaataaaacccattgatgaggtttgttcccaaaaccttgtaaatgccccagtgctttcagcctgaggacagatgcacagagcagcctttcagcctcttgggaggaagcccttagacaaaaagatgcatatgctgacatttggaaactcccaggcacagggaattctaaagcccaagggatatgggctcacacacaactcccaaagtgcagcttaagcaaaacctaacctgagacttcgagtcatcactctctggataaataaagcactggcaaggtgatgtgtttactgttcaggaaaaggatgtagcccttgcaaagagggagctacaaaaaccagccattatgggacacagcatcttattttgctctgacaaccagaaggggaattcgggtgacgctagaaggtcttgaaagtgacaactgattcatgaacgtctttccacaacttgaggaaatgcagccacccagggcaaccctggcacaccttttgctggctctgatgactacatcccaacttcttcttaatcactcttcagagttgctgctggagggaatattttaggaatatttaaagacaaggctacaaaaattctctaaggtacagatgagacagcgcattgattgtttactccctaaggggctgcaaagggcaaagcacagaactcaggtcttcttccagctggaatgtatggacagggaccacttacaagaaaaccaccatccaggaaagcaggggacagagagctgcctggggagacagtgattaatcaggcatgggcgaggggaggccacagtgcctcctgctgaaatttaatcagagccacgggtcgtacaccatggcggcgagtgccagggcctctggcagacgatgaatgcctcctgccaaggagctctcacgaatactctgtgagcccagatttatgctctgcagccagatgaaggtcgcaactgagcagaactgctgcagcgtggaatctgcagttcagccttggaaacagctggtgccgttaccgtccttcctttcatttctgggataaagagaactaagagaaaagtctggtgggtttcgggtgatccttgtgaccagccgtctcattttgccagggactttcctgtttttagcattgaaaagtcctacatctcaggaaacccctcaatcctgggcaaaccaagacagttggtcacccaccctttggcgctattagtagcgttggcccacctgggcccagtgagaaattcacccgaggttagaagttgacatgaatgtaaactcagcagcacctctgacatcagaaagattcatcactacaatggctggatcctttgagcagtgagacagaataacacaggattctgacctccaaggtggttacacgaaaaccagacaataactaaagacaaccacaggcgccatcaaacactgaatcgaggtgaggatttaaatcagaggccagggcaactgcatcatccttagcttggcttttccagagaacctgataccctactcccgctgaactaccacagaacccacagggactctgcagagtctggaactgaccagtgaaagttccaaactacaaaggataccatctatcatcactcccactcacaactcattgattaaaatggcttataagacctcacccaaccacaaagaggcctggtcatgggctcagaccgtggacagtttgcaatatttagcaagcagcagcaatgactaccacaatgtgtaccgaaacagttaggtagctcaagaggtaaccagttgacctagtgaggacaaatgtgcaaatgtcgaagatgtttgtgaatagtttgaataaaatttgccaaagatgttcatgaataatttgaataaaatttttcatgaactacgagtgcagaaaggcaatattcataaatcaatacattgtttcatgtgcaatttaaaatgtgtttattttaaaattcatattttaataacagattaaagtaatataatggaaaagtgtctgcaagtctaaatccaacacatcaaagaaaaaggaaaaactgagtaaatatatatgcacatagataatgaaaatctagctcagtttcttaatacaggaagagctcttacaaaccaataaaaggaataccatgaggtcaggcgaggtggctcacacctgtaatcccagcattttgggaggctgttgtgggcagatcccttgaggtcaggagtttgggaccagcctggccaacatggtgaaactccgtcatctctactaaaaaaaataaataaagaaaaataaaaattggctgggcacagtgctatgtgcctgtaatcccagctacttgggaggctgaggcaggagaatatcttgaagctgggaggcaaagactgcaataagtcgagatcacaccattgcactccagcctgggtgacagagctatactctgtctcaaaaaaaaaaaaaaatctatgaaagaaaaaaacataggcaaagcatattatcttttggggcttggggctttgctaaataataaagcaagaatacaaatgagcaggaaagacacaaaaagataaattcaactttagtgaaaaaatatataactcaaaacaataaggtactatttttacccaccaaattggcaaaactatttttaagaaatgacaattctaaattatgacgcatatgagctgaatatagagttctcatgcactgctggtaaacatataaactgttaacaaactttatcaagaacaataatatggcagatggactaagaatcgtcattcattttttttcacccagaatttcctcttttagaaacactgcctaagaaaataaacatacaaagacatatataagattatgttcattttaaacataaagcacttttttaaaaactagagacagcattccatgtacattcaagaagaggtgtaaataaattgcggaatggctatttcataaaactaataaaaaattatggtgtagaagagtatttaatcacataaaaaaagtcaattatataaattgtgagaaatacattttaagcaggccaagaaagttgatctatttttattatcccaatttcactttcaagcccgttcttatactttgcatttatatgtaaaattggcaagaatccacaaaatatcaccagtgattatctattcatgtaagattataaaggacttttatttccttcatcttctatattccaattattctataataaatattattttcatagtaaagaatacaataactttttccaaggtatgctaatgttgtattaagaaattaaggtgactggaaaataaaaattactataattgtttacaaaaagataagctctcccaggcttgcctcaccaggggtctgcaccctgcacccataccaaccccagaccagcacctgttctggtcattaaccctggtggctacccattggttagggtggagggactgactcactttagccacaagtttctcagagtgggatttccacctcctcaaatgtaggcaatgcgctggggacacagcaagccactgcaccagtctctagctggaatgtcaccttagctgacggtaagcaatttgtaacattctttttatattatgagcaaaataaaaaaattgcttgaatgtttcagaaattttgggcttgtgagaggctacttaaggccatgcccagcaagttccaactcactgctctcactgagcagggtttctcagcctgggcatatggacattctgggcaaaatactgttttgtcggtggtgaggaggttgtcctttgcatagaagtttagtagtctccctggcctttatggactagatgctagtaaaacacacatggttgtgatcaccaaaaatgtctccatcactgcatcctggagaaaaagtccacactagttgagaaccagggtggttaagtacactccatagtacctaggttaaaagtttccatttggtaaaaacttttgagaaacactgtaatcccactaaactccaaaagactggcagaattcaaagtggagttgcaccactcacttaatttcacctaaatgcacttgcctttttttttttttttttttcctttcacccaggctggagtgcagtggtgtgattatagctcactgcagactccagctcctcaaactcctgggctcctcccgagtagctaagactataggtgtgcctcaccacgccaagctaattttttcttttgtacagatgggggtgagtgggcctctcgctactttgcccaggctggtctcaaactcttggcctcaagtgctcctcctgcctcaaggctccacttcccagagcactgggattacaggcatgagccatcaggctggcctacttgcctcaggcagctgacagccattccactcactgagcatgagctgcaggattagggtggagaccccgccccccagcagacagccccacccacagtgctggctcttgggtcatggcctccctttgtccttcagctccagggccaccctctaatccatgggtgaattcccatttcccttttgggttttaggctttcctttaacacctattccctggataaaattccctctgttgacctgccaagtgtggcaatatttgcctggctgaatttcaattgatatattgtatatttattgggataatgttacatatatataaatatacatatatatatgtatgtatgtatatatatatatgtatatttgagactgagttttactcttgttgcccaggctggagtgcaatagcgcgatctcagctcaccgcaacctccgcctcctgggttcaagcaattctgactcagcctcccgagtagctgggactacaggcatgcaccaccacgctcagctaattttgtatttttaatagagacgaggtttctccatgttggtcaggctggtctcagactcccgacctcaggggatccacctgcctcagcctcccaaagtgctgggattacaggcgtgagccactgcacctggcacatttatatattaacatagggaaaattgacatctctgtgatcctgtctttctattcgagaatatggccaatatctttccatgggatcaaatcttcatcttcgtccctccttccatagagttcagagaggttcaaagccttatttagcacttccttagcttttttttttttaagtttgttgaatttcttcccttttttttttttttttttttttttttttttgtgacggagtctcactgtcgcctaggctggagtgcagtggcgcgatctcggctcactgcgggctccgccccctggggttcacgccattctcttgcctcagcctcccgagtagctgggactacaggcgcccgccacctcgcccggctaattttttgtatttttagtagagacggggtttcactgtgttagccaggatggtctcgatctcctgacctcgtgatccgcccacctcggcctcccaaagtgctgggattacaggcatgagacaccgcgcccggctcttcctaagtattttatcctttatgtggccagtgtaaatggggctgcctgtagggtggctgtgaagactgaataggataatatgtgaagtacttaacaagtccctggcatgtagtaagtgctatggaaatgcttgctgtgatagtcaacctttgttttctgcacttcttcctctaacgggttatggtttagatgtgagccatagttgttctgtctcgatttctgcctagctcctgttcaggtgaagctgagaggcagaaatggatcaagccttaagcagatgcccaagatcaaggcactggcaggttcagtgtcttgcaaaggctcactctctgcttctaagatggtgccttgttgctgtatctcatagaggggacaaacactgggtcttcccatggtggaagggccaaaaggggcctagctatttccctggagcccttttataagggcagtaatcccattcatgaggaccaaactctcatgacttaattacctcctaaaggtcccacctcttaagactatcatgttgtgtctcaggttctaatatatgaatttgggggggacatataagttcaaaccaaagtagggtggcatgccagcaacagccccatcccataaccagctctcagtcctcttatggaggtcccttccccactcatttctgcccccagaactagagaattttcctcactggcccatcttccccagaagccagagactttttggtgctaaaacccaatcaccagaagcaaggacacaattattattgcttcatgtgtcctatctagcttaagaaaacaaagtttaatattcctagaaaacgaagcattcttgtgggcaagtctcatggtttaaaacaaaattaacgtttgctgtttactgttcacggttcagaaacaggctgacaattgctctctgtgtaacagtgagctggctgcataacaaactgccccaaaactcagtagcttaaaataacaatcatttaattttgctcttgggtctacaggtcagctgcgttgttctgctgatctgcaccaggctaggctaatctcaggagagtgagttagagactgacggatcgaggatggcttccctcctgtgtctggcagctgtcagcaggggcagtgaatttgactggaatacttctctcttatcaatcaggaggctaacctaggcttatcttcatggtgcaacggagttctgggagagatcagagaacataggagttcttgggactgatgtttggaactgatacagaatcactttcccccacattctattggccaaagcaagacataaagccagcttggagtctaggggtaggaaatagaccactcttcttgatggatggggctgcaaaggcatagtgcacagggcataaatacagggaatcatgaataattagggtcacaatcaatctaccacactccccacacaaagaagagaatgtttagcatcgatttccttcattttagcaaacgttgcttcatctcactagcagtctacatatggactgattcaggagaaagttctgcagatggtcaacctcactcacccatttattgtgaaacacatcagttgtactttgctttttttttttttttttttttgagatggggtctcgttctgtcacccgggctggagtgcagtggcacaatctcggctcactgcacctcccgaatagctgggattacagacatgtatcaccacacccagttaatttttgtatttttagtagagacagggtttcaccatgttggccaggctggtctcgaactcccgaccccaggtgattcacccacctcagcctcccaaagtgctgggattacaggcatgaaccaccgcgcccggccacacttttgctatttcttgataccgagcccaaatctgagtctgtttgagagtgtgatcctccacaccaactgtagggatatctatttccctcgctgtcctggtttctgagagcagttccttgttttggttggagttttccagcatagatttaccaagatgctgagaatagttcccagctagtggttgaataaatatttgttcacttgtcgattcaatcaatcacaggctgattaattcccagtgctgttagaagtgattgaaaatgtcacatctgattgtcaggcggcagagagcacttggaggtaatccagtcatctctcttccttctggcttctccactcttaaaccactgattctgtgtcagtttcaagcgtaaggaccatggacacctggtgaccacacagggagagactttccctgacaatctcttctgtcttctccctctagagggtaaccaagccaccctgggccaggctgtggagtggctggaggttgcacctgccccttgcctccggcactgcatggctgcactcctatccaccctcccagcccacaggtgaacactaagcagccccaggccccattgccttggggtaagaaagtgggaagcaagaaactaatggtccaatcctgggttgtttaggtagagaggaaaatactcagaagacaaggaaaaggatttttaagaacctctaagaacatggtttgaggagaagagccatgctaactgtagggacttatgcaaagtttgccatttaaactaattagcatgtggcaataactactgtgcttactactgtgtgtttaaggttttattcactgtgtgttttacttgatcatattagactttcctcctacatttggagttcccttgctcaagtaaaatgtcatatattatgtgtttaaaaggattctagtatccaattgaataaaaaagaatatatacatatgcacacacacgtaagatttttatatatcatggagtaaatgtatgctttatatttataatgtctacatatcatatttaaatttatatattgatatatagctatttaaaataaaaggtatatatcttctataaatgttttgtatagcttatgtagctaagaaaaattatatgtccatatacttgcattttcactaaaaaatgtctgatacataaagagatgtaagaatgagataataattacctctagagagttgttttttattttcctttccatacagttagacttttcattgtgagcatgtaccacctttctagcttttttaaaaagcagtttatttgtaaattttaagacagttcttccaattttcttacctcattatccccagcttaaattgtaaattcagttgacttttttagattgaattcttcctggaaaaaaaaagtttcccacaatgccctgccagaaggatatggtgtccaacccagtttaaaaagtgcacccagtctttaggttcaactgctgaagaagcccaacccctgggctggagacctcccctgccccctcgcagcccaggctgtgggtagcggcagcgtctcccctgctctccccagggccgcggcggcaaaggcagcatctacgtgtgggcctccggggacggcggcagctatgacgactgcaactgcgacggctacgcctccagcatgtggaccatctccatcaactcagccatcaacgacggcaggactgccctgtacgacgagagctgctcttccaccttggcttccaccttcagcaacgggaggaaaaggaaccccgaggccggtgtggtgagcacgtccccttctgtccttgtttccttagggccactgcacctctgtgtcagggtgggatgctgggacactggcttgctcccctcctgtcccctccctcagagcctgaactaaggctctgaagggaagaccccttttctctatgcccagtcctgctttctaacaaagcacagacctcccatctgcgagctagtagcatgatcggtgaggactcctttctggatcgttttccatagattttcttgtttattgtttctggcttacaagtaatgatgaagtctggtttaccaatcagttgccccattccatcacttacaagaataactaactcattgtaagaaccaaggcatcacactgtaaccctgtctgaaacaagaacccatctgtttatttatagcaatttaaaaaacaacattcacggatggacttttctggatccataaaccccgtaaaattgcacacacatctgttattttctcagggaaagagttgtgattttcatcatattttaaaatggagccatgatttttagaacaaaaagattaataatcacagatttattgtttgttgctcttttctgagcaaagaaaaaaaaatcttcctttcttggcaactaggtataatggtgaattttccaagcccctgggaaatacatcatctgtaaagcataataagcttttttggatcttttcctctctggagattttgctcacagatcagccttttcttacacctccaaaccaggatttagtaggtggttcagtagtcatgcatgaattatatcctgactggctgcacccatctccactgaggcttcttgagacaggaggacaggagctcaggacaaaatcattagtaccatccagtgtttcgatcccacgctcccacgtgggatcccaacttggcaagatggccatgcccctgcgtgagcgaggagaagccctttacctggaagggacgcagaccttaaaagcctgtccttcccacgagccctcctgcattcccccttggtcttggggaggatgaagaatgtgccagctcctcccaaacagaagggggctttgacccctcttatcctgtaagctgtatggacagaaagggagaagggcagagcagacagggacaggtgaggtgacacttcactctcacgcctgaaagctccactccctaccccaaagacctctcagtggtgtaaatttgtcctcgacccgtatttatgactctttctacttgggctggctaaaggccttgagtttcctgtgagtactataattttgctcaatagatgcccttaaacctccctggtaatttcttcctcaaaataataagctctcttgaggatcctacagacagaggaagaattcccgtcgtttatacatgattttaatgaacaccctggctctcacaaacattgaaaatgaggtttttcactttgtgaaagtcctttaaaaatctgtttaccagtctcccctctaaataagagttgtggaggtgatacccacatattgggttgtcttgactcaacacatctcagaatctctccgtggattttagatgtagagaaacatgttttaatagcctgcccttctagagagactttagctgagcatgttgattctttcctcttcgggaatgccttctttcccccaagaaggaaaaagaaatgctgatgaagtggcctttggcctttcaagggccagtcccaatgcaacaaaactagggtgggggtattgacatcactttccacttcataatgtttccttttaggtttcaggaaataaatctctctgtagtctctggaatagccacagatatgcttctttgaacaactcatttatcttgtggacactgtaactataactgactatatatccccttttacgtgggctactaggaagctcagataaaatctagggcaaaagagaggcatatggatgctaagtttatccttagtttcatcttaatcttcttgggaacaaagcataggttaaataaaaggagtaggctgggggcagtgactcatgcctgtaatcctttggaaggctgaggcaggtggatcacctgaggtcaggagtttgagaccagcttggtcaacatggcgaaaccctgtctctactaaaattacaaaaattagccgggcatggtggcacgtgcctgtaatcccagctaattcaggaggctgaggcaggagaatcgcttgaacctgggaggcggaggttgccatgagccaagatcatgccactgcactccagcctgggcaacagagtgaggctgtctcaataaataaatgaataaataaaaggagtagataatcccctgctccacattgtgcgggggttcaaaatagcgtgatttatccactcattactcattatcttcccttccaggcaaccacagatttgtacggcaactgcactctgaggcattctgggacatctgcagctgcccccgaggcagctggtgtgtttgcactggctctggaggctaagtatgttcatagctctgggtccagggccagctctgcagggtggactaacacgtgtctctctgcccacatgccaggtgtccatggagggaaaagttgatgtgagaggccatgaatagtcagggccaatgaactctgctgtgcatttctaagtggcccatgtgcccaccagcacacgtgcgtgtgcatacacacacacacgcacacaccataaaaccacattcctgggagcacacaacacccagcagcacgtattagcaacttactcagatacccagtgaaggcacagagatatttctttcttcatcaaatttacccctctatcctctgtgtatccctgggctcttctactccagtgatattcacaatcagctacttgaagacaaatcaaattgccaggctggtgtttcagaacatgtggcaaacaaagtggtcccactcaagatttgttaatttgtgaagtggattcactttttaacactgaaacaagataggcaaagtcacgcagtgtagaccaagatatgggctttcctgggagaccttccaagctgaaggtaagaggagaccatctcctatgtcctcaccatcctatggagaggccacatattgctactgctggacacaccttggatttgagtagcagtggaggtacctgcccacctgctactctactttcttttaatgatacctgaggctggccttatgttcacagaatgaacacatgggcttcagacaccacacacatagtgtgagtgtaagtgccggctgtgtagggaattgtcagagaatgcagttcccagcaacttgtgagaagttggattcagtctcttggggaaggagagtagagttgctaggcaaccagggctcccagcatcaatctctaggcagccctgcttgtctctctccacataggcagtgcattttctgatttgcaaaggaggcaggagttggttcctagaatagaaaggggcttcaacagattacctagttcaaccctctaccttcacaagaaaaggcataattatcctccctttacagataagaccccaaattgagagtgacttctctttttggacaagtctaaactttgactcttctaacaaaattcagatagaaaatttatgatgccaagacactggtcaaagctcaactattaggcacagagacctctgccctatcaagcacagaaaacaaaatttactcatatccaatgtacatttcctgaagataaaactgttcatctcagggtctgagtgggccctggagcctgagctggccttgctcactgcatccgcaaggagacaattagcacagcctgctgcctgtagctgagctgtgcagagccagggaacaggagtgctccaaaagcgagaagggtttccggttgccctttcaacctcagaagtcaggacttgactcacagtcttctggatttttgacaaacaaaatcctatgcctatgcctagatccataggcacacaaatggaagacctaaataaatcaaagtgggggagtgaggctgctggactcctagagattcatggctctgccttgattagtcaccattcttttagcacatacgtccagatatcctacagaaaagaatgcagtcaccattcaggcatgctttgttttgaagcaatgatcatgaacttaatattctctgctggcataaagaggaaaaaaatataacacctggcagcttgtgggtaagtccatcacgggagccggtcctaaaattcttcaaaataccaactttctgaggttggaagcagaccctgagatgagattttggtgcaagtgatttattaaggaagggatcccaggaaaggcagtaagggagtaggggaaacaagttagggatggggaagaatccaagcaaaggttcaacttcaaaagttctggcctcagtctaatcccgagtgtaaattaggcctcagagtttgttctacctccaggcaaggaagcaggactgtcatattcttatatgagtcagtcatcggctaagagctactctggagaagtaaactccaaggcatctctagctttaggcaaagcggctccaatagccaaaagtgaaaaccattggtcaggatgagatactccaaatgagagcccagagggatgaggaatagggcctccacagagcagtcccaaagctcatctctctcttatcttgagataaggttacaggaagtcctcatgcataacaacaaattatctaaatgtatgtccatcaggaccttgaaagagagagaacaacacttcccccatcatgactgtaggggagaaaaagaaaaccatctctctctcctaaccagttgtcactttgtagtttaatatcataatgtacttttctgcctaatgcttgaaaatgcctacttgagtcacaggaaatattgctcccatctcccagtatcaccaatatcagagaaatttcaaagaattttagtgggggatgactgccaccttcgaatatttaggtttctctcatatgacctggtgctttctctgtggtcctagagggtgagctaggctcgaggggtagatgtcataagaagatcagtttttgactcaagaaaatcatctggagtaaagtggtccacatgctggactggaacaacatttccaaaactgaccttccaggggatggatttttaatgtaaactctttagcgagtatagtatatagaaagaaattcattaggtgtggctccatgacattttaactaaatgaacagacccatgtagccagcacccaaatcaagaaacagacgatttatgtgccctgttgctcagcagtgcaagagattcctccatgttcctgtatgtagttataggtcgttcattctcattgttgaatatcattccattgtataaatggatatttggattgtttccatttggggctactatgagtgatattgttaggaacattcttgtacatgccttttggtgaacatacagatacatttctgttgagcgtctactagggagtcaaaatgttgggtcattaatatacatatgtgcaattctagtagatatcgtcaaatagtttcctgaagtgggtgtacccattgaccctaccttgagcagtatatgagaattacagttgccccacatccttgccaaaatgtggtattattagtcttctatattttagcattcttatggatgtgcagtggagtcatattatagttttaatttgcacttccctcatagctagtgaaattgagcacactgggtaaagttttttaaaaaatacattcccaagcctcacccaagcctcatagaatacaaatccctagggatgggtggcccaggaacctgacttttcaatgcctgttccccgggaatacttaagctgccagcctgtcgctgatctgtgaactagggtgtgaggatgatcaataaggcaatagctctgtgaatctatgactctgggtgcagagtgtgggtagctggcttctgcctctgattaggtgttggtattcagtcaagatttaatgtttctgcatgaaacaacgaatccaaataataacagagacaagggtttatttctctgtcatgtgaaagaaaatacagagataaggaacccagggctggtttagggtaccggggtaccattgtgaatcagggaatccagctctttctagctttctgctcctttgctctgccactttcatgttctctagacgtgctggaactccagccaccatgtttacatttcaggcaggaaaaggagaagcacaaagggcaaaaaaataaataaataaacaaataaaagagagagagagaaggagagagagaaagaaagagaaaaataaaaaaagaaagaaagaaaagaaagaaggaaaccagctgagtcagccatgttgaaggggttttccaaggagccccacccagtggcttctgcttatttctcattggctagaactgtcacatgaccaccgccacacttcaagggaggctgggaaatgtaattttatagctgaatgcattgctgttctgaataaaactgaagttttcttaataaggaaggagaaaagatagatatggagggaaatacaactgctaatgtcttctggcatctaagtggacaatcactcatctctggatctctattgtcttatcaacaaaaggtagcaagttagatcatcaataaggttccaatgacttcctggaatattttagctctgcttctgaaatattgtttttttagggaagttaatattttaattggatgtctggtgatttttaaggttgaatatgccttaaagctgaaaaacgttcatttacatacttttaaatattgaggtcaatacttaggaaatagtaatctaatttactttaacttctgatatatgtgatatatgttatcattaataataataaagtctttttattcagtgtccagcactgtgctaggtactttacatacataatttacatttacatcctgcaacaaacctataaggccttatgcccattttaaagatgtaaaggctagagctcgaattgttaaagtaacttatccgagttcacacagttggctttaagcattaggatgcctgttccactgggctctcggtggaacatagaaaaggccctgccactgtcttgcctgtggggctcaccactcatcctgccatggcaatgggttgcagtgaatgagttagctcttcctcaaacatgatgcacaaaatcaggtttcactttctttgagatgagattttccacaccacaactacaccagggagtcatgaaaactgaatttcctctcacgtccttataggacgtgagcaaacaaaggctatggagaaaataccagcttgactcacaaatgcattatttttctcagactggaaataatccaacctttgaaattattttttaatcctatcaaaatttagaggatagactcagaattttaaaaatgaaagaaaatgaatggatcttttacgactccaaacatctcttatgatgaagagaacgagacccagagaagtgaaacaacttgctccaggtcacacagtttacattgtcagataaagatcagatccaacaagtaaagggattaaaattctcctgttgacttctagaatttaccagatgttaggagaagtgattcctccaaccttaagactacagcatcatctttaaaacatttccattttcaatttctctaaagatgcatgtgctgactttaaattacttttgctgccttgatcattaggaggaaaatgttaattgggttcaggggaacttgatgctgtaaatagaagtactatgctctgaaagagaatggtgagggaacagccttgcacacgagaaaaacaatccattctgttagaagtcaggttcctacaaaggataaatgcttgaggtgatggataccccatttaccctgatgtgattatcatgcattgcatacctgtatccaaatatctcatgtaccccataaatacatacacctactgtgtacccacaaaaattaaaaattaaacattaaacaaaaagtcagtctgctggtcagccacttcctaagagatgcttgctgacccctggacccaagtttctcagatttcctgatgatcagaatcctggagtgcttgttaaaaacacagataccctaagcccactggagatccatagaatcagaatccccaggggagcccctggaaagctctatttttcaccagcgcccccacccccaccagtgccgtccaggaagttaggaagctctcccctgaacgaggtttgctgcatactgaaaatactaaatgtttggaggaatccatggaatcaaaacctctgaacctggacatcatttttttaaccatccccaggtgattccaatgtgcagacaaggttgagaaccactgtcccagactaccaatgttctcaaacatcactgtacagaagaatcatttggattaaatgcaaattctcaggcccacaatctccaagatgctgattcaggacaggtggaaattcacatatgtcactaatggtcctgacacagggggattgaggatcacagtgagaactcctgactaggataacacagaggctccactgatgcctccctcagcatcctgagctcccccatcatgacagccctcacattttcaatactgagttgtccctctgtccccctaggctatcagctggtggggacagggacatccgtctgacatgcccagagttagcacgatgcctgaatgtggtagacactcaacagacatccatacaatcacttcattgcgcagtaccttctcatatatctgcatcttattttcccgactcatataaaacatttgagaacagggaagaacatgtcacatttcttgtcctacagtctccaaaacagtgacctgtatatcgcagatactccataaatttattttttaattatttaataactatcacctgtaattcttgggctgctatggtacaattaaagcaggttgatgaaataaatacctactttacagaatattgtagtctgtcaattcctaaatcattcagaagggatactagaaggaacctggttttactcttcagacatatgcaaatagcaggtcaaacagtgtcatagactcagttacactggagagtgaactatgctgtggtttatctcaaaagtgaaaagttccttgttctgaaacattatttctctctctctcatgctctctctctttctaaaatgcaccccatgagaataaatctgcagagaaacatttaagggagcccttctccaggcatcagaagtacagcccattttcatggcaaagatgagaaatgagaaacctgctagccagccctctggtcatttagatcctcatttgtcaacacttctgagattaataaactcagaatccccttccagcaaaacactcagtttttagccataatcaacttaaggaacttttacaccattttacatcatttacaccattttacaccacttacatcattttacaccatatgtccaagacatgttctgaatctcctcaaataagcattgaccttccttggaacttgcttcttttctttttttctttttttttttaattatacttttaagttctagggtacatgtgcacaatgtgcaggtttgttacgtatgtatacatgtgccatgttggtttgctgcacccattaactcatcctttacatgaggtatttctcctaatgctatccctccccatccccccaccccccacacacacacatgacaggccccggtgtgatgttccccttcctgtgtccaagtgtggaacttgcttcttaatagaagaaggtctgcattcaagagcacatggatcatttgaactcttggttctgattcagatcttccaaccaatgaactttgcatatgttgaaattttatcaaatgagttatgttgctcctggtcctttgaattgtttgacttctgaagagaactgtagtgcaaggttttgccaactttttgaccagaatcctcggtgagtaataaattttgcactgcagctcagcacacacacacacagctaccctccaagtatttcatgaaaaaatagcttcctgtattatgtgcagtgcatactgcttttctattctgttccattcattttttaaaataataacaccaaccattaaatcactggttctcaacattggctgtctgttggaatggtctgagaagttttaacagtttccaatgcctgggtctcactcccagagattctgatttacttggtctgggatgaggccctaggcatgagatcttcaatgcccctaggagaaaattttcatgggcagtcccaacaacctgtgcgataacctggcccaaaaacaaatcatgatttgcaatttgaaaaacatagacaatgtgtagtaatagacactaatttccaaaaacaataacatttacaagaagactagtttattcactgaacaatgtgccaaggaccatcctggacactaaggatataaatatgctaaatataatttctctacccttgaagaactggtaccctccttttcaaaaatggaacacacccacatgccagttcccagatgaagggacagcaagaccagcactcagaagctccctgtatccccttccagtcactgccccacgagactgaccactaacatgacctccaacagcatagattagtcattcttgtttttatattttaaacagatggaatcatactttatggtctcttttctgcctggcttctttaggccaacatggtatttgtgagatttttccatgttgttcagagtacctggagttcattcattctcactgctgtatagtaccccacattctataagttacacctcaattagtttactccctatcttttggatggcatgtaggggtttcacagtttggggctaggagcattctagtacacaggtctggtgaatatgtacacatttggtcaggtatatgcctaggaaaagaatttccaggccatagcttaagcttaactttagaagatacagccaaacagttttccagtttagttggaattacttgcacgctcatccacaaagtacatgtgttccagttgctccacatcttcaacacttaacattgtcagtctttttcattttagccattccggtgtgtgtgttagaatagacttttgaaatcaatttatgtaagtaagaaaagcaagaagatttctttaattgacttatatagtggttttgaatggtgcatggacaccctcccttgaatttgagagttcacagagattccaaaatcttacaagaggtctgtgtcctgagtaatatttctcttaatcattgtgcctctctccctctctcaccctgccttttgcccttgccctcttgctctctgcttcctgtatccagcctgggtctgacctggcgggacatgcagcatctgactgtgctcacctccaaacggaaccagcttcacgacgaggtccatcagtggcggcgcaatggggtcggcctggaatttaatcacctctttggctacggggtccttgatgcaggtgccatggtgaaaatggctaaagactggaaaaccgtgcctgagagattccactgtgtgggaggctccgtgcaggaccctgagtaagtgggggtagtggtccctctgctgcatgtggaaagtgcccctgagatggctccatggcattggcataatatcacattccctcttcatgtttgggtcaactgtattttttgtttgtttgtttgtttttttgagacagggcctcactttgtcacccaggctggagtgcagtggcgtgatcacagctcactgcagccttgaacttctggtctcaataatcctcctgcctcagacttccaagtagctagggccacaggcatgcgccaccacaccctgctaattttttttattttttgtagagacaaagcctcactatgttgtccaagctggtctcaaactcctgggttcaagtgatccttctgccctggcctcccaaagtactgggattacaggtgtgagccacaatcctcggcctggatttgactcagggacaaccagtttccaagcagagctgcaggtttgcataaatccaggaggcaccatttacatagaacacagaacccctgcttttggttgtgagccttaactgtttcagtgatgtatgccattatttctaagggcacaaatcaaccactataaacatcacccagctcaataaggagaacatgactaacacccccaaaggccccctgccgtgaccactgccattaacatccccatgccagcgtagccatattcttacttctaactccatagcttaacttgcctgttccatacttactagaatcatacactatgtcctgttttacaactagattatttcgcttggagttatgtttgtgagatccagtcatgtttaatgtgtacttacagcttttctcattgctgaagagtgttccagtgtatgactataacacaattcgtttattcattctacctgtgggacaatctaaggacttgattttccgctgagtgaggtggattttgccacttggagggatttgtgtatggggttccctacacagaaaccacagcgttagtcaactgcacccacttcccttccaactgccccaccttggcaagtggattggtcagtaaggatacttcttaatttctctctgtcctccttgatgcattagtaaaatggagatagtaatttttattattatcactgaggtattatttacatgtcatcaaatacacagaacttaagtgtatcatttgagtgttgataaatgtatacaccctggtaactaccactgaatcaagagatgaggcattccatcaacccaggaagattcgtcatacctgcttccagctcgtccacacgctccacaggcaccctttgtttttgcttctctctctgtagattcgtttcaccagttttcagactggactgtgtccagtttctttttctcagcatgaggcttgtgagattcgtccaggtcaccatgtgtagtcgtagctcattcattctcattctaccttgagaatacacctccgtggcttacatcatttaaatggtggtaaaattcattccctgccagggtcatatttccgaggaccatcgagcctggccagagtccaacccctctcagactttatcctcctcgccactcttcattggtcctagacttgctgcatctcttctactcagttacccagacctgaattccaatcttgacttcaccaacttagacaatacttttgacatttctgaccctctgctttagcaattctcaacctttgtgccctgtctccctttgacagcatggtgacgtctatgggccccatcagtctaatgttctccaaattcattagataaaatgcactggattgcaaaggaaaccaattatgttgaaaccaattagaaaataaattcatgctgaaatatatgtccccttgtcagcacattaagtaaaaagctctagtggcaagtctaatggccacaataatttcagagcagcagtgatgactaattgctgctgcaggatccatgcagtggctgtggtgggacacgaaaatctgccagctctttgatgacaaagtccgaggaggagctaatgccactctgctttgtggcctgcattcataatcgaaagagaagaaaagtttctgttataatctagtgaaaattaaaatgtggaattttttccattgaaattattagaccccctgaattctatccaaatgggccccaaaataagagatttttttctctttcctcaccagtaaaacggagctaatgtttttcctccgcaggctgctgggagactttagcaacacacaagtctacagcaggcacacagtaggcacttaataaatgtaacattgcctctccttctcattcatgactagatgtgaacacttctagcttacacctgtagaatcaaaagacagtaatctcctagagtttttggtgaaataattgtctgatttttatgcaaattccaaatcagatatcctctcagcctaaaatatcctccaatggacaagcatgtgccctgggattcccatcctcccatgggccagcagcctgccatagatgggctgcctaccataggtaagcatcctcccacgggccagtgtcctcccgtagatgggcagcccaccataggtcagcatcctcccacaggccagcatcctgccatatacgggcagcccaccataggtcagcatcctcccatgggccagcatcctgccgtagacgagcagccaaccataggtcagcatcctcccacaggccagcgtcctgccgtagacgggcagcccaccataggccagcatcattccacaggccagcatcctgccgtagacaggcagcctaccataggtcagcatcctccacgggccagcgtcctgttgtagacaggcagcctaccataggccagcatcctccacgggccagcgtcctgttgtagacaggcagcctaccataggtcagcatcctcccacgggccagcgtcctgctgtagacaggcagcctaccataggtcagcatcctcccacgggccagcgtcctgctgtaggcgggcagcctaccataggtcagcatcctcccacaggccagcgtcctgctgtagacgggcagcctaccataggtcagctcctccacgggccagtgtcctcccgtagaagggtagcccactataggtgagcatcctcccatgggccagtgtcctcctgtagacgggcagcccaccataggtcagcaccctccatgggccagtgtcctgctgtagacaggcagcccaccataggtcagcatcctcccacagaccagcatcctgctatagacgggcagcccaccataggtcagcatcctcccaagggccagcatcctcccatggacaagcatcttcccatgagtgagcatcctcattgtttactcactgaacccctagaaagtggcaccaagtggattactgccaagctgagtattttttttccatgaaacagtccatgatttaagaaggcctcactctaatcagcaccacatggaaaaaataaagcttcagcccaagccctataataatctaaaaacacagagctgcccaagtcccaagtgatgttacaaatgtcctataataaaaatagctactctgcacagttcctcaccattttccaaagcttctgtgtccacacatcatttctgttcactcccgtatccctcctcttggcaggacagacttctctgagctctaaacaagttgattgacacagtcaagcccacagaggctgtaaatgtgagactggaagtcacttttattgagtgccaactgcatgctatgtgctttcatacacgtaagcttcacagccaccctattgttgagggtgtgccttatactcgcacagtcgaggtgggagcaggggtgaatattttgcagccttaacaacaaactggtcccatgctgggtgtcagggagaaacaccaactaggtgtggtatatgctaggcccatttacattactgtatttaatccttgtaagcccaggaggtgtgtcctatcattattactttttatacacaaggaagctgagatccagaaaggataaaaaaaaaaaaatgtgctcagagtcacaaagggcagagcaggacttgaagcaaagcccatctaaacccaaaccccaggctcttttcactacatgaccttgaccttaatcagctcccgtgcatacaggtcctacattaggccgtatgtgagagcagccctactgtgagctcacagtgccattactgatgacaggaggttgggaaaggtcaagggcatgctaaatgtcatccagctactaagcagccaaactgggatctgagcccagtcactttgacccctcacggtgggctctcaggtatctcagtgactccccctggagaaggtgaggcttgggtaggggagggagtttcagtaaacattcccctggggattctgaaacacccacctagtgggtgctcccatctcccaaaccccatcactggcattccagaggcccttttcactggtctacaatgccaaggtctgccgtgtcttttgggaatgaacaaagagacaagactgggaaccactgtccaaatgggggatttaaggctaaaccctactcatcataactaactttacccaaagtcaacatgaaatgggcgttgacaactgtttcccttgttagagttcagaataatttcttgagaaatttggaagtgcagtgactttctgcagtggtgaaaatgttctgcactgtccaatacaatagcttgtggctattgagtgctagaaagtggatgaccgtgattaagaaacaagagttttcattttatttcattctcattaatttaaatttaaatagcaacatgtggctggtggctaccatcttggacagccatgtctaaggcacatctggtagttacatcttagcaggagggatgctgaattgtgcaaaccgaatgggaagtggagatttaataacataaactctatgaaggggtgtcaagaagatgagactgcaagaaaggcttgctggtccattttatagcctcatgccttcccccagcacgacatccaattgcagcatcctagaagcctaaaggcagccttgggagggtgctagtaagaactgctgctaagaacttctctcggaaagtcactgggatagcactttattccactatctcatttaatcacaggaggttggcatccctagtcttaatttaggtgagaaaacaggatcagacaaataaagcaaacggccttaactccaatgtccttatccattccacaaggccctggggcctggtacctcattcccttattgcaaaaggagaaagacttacgatgtctgtgcctttacagacactctgcaagcagggagtgggggctggaatgtccctcacaggcagtgcaactggcacgatatctacacttacttgcatataagcaatatttacaattaacaaaaaggcagcaccgttgcagtatttaggggaagagttagcttggaatgtactgcggccctcttagtcaagctacgtgtcaataccaggctatattttctgagattgcactggacaagccagacggacttctaatgatcgtcaagcaccatatgattatgagagagggcaggaggggagcaccgcgggagagaaggagagagagggaatgagggcgtatgctgagatgaacggcagtttatctcccagtttctgaatatgcttagcattccatcataatctgcatacatgtggaatttaaggccagagagaacactggaaataatgttatccaagtccctgtaaggaatctgaggtccggagatgtgatcatcccaacatctcacaactatccaggaactttatgcaagatcaatgcagtgttttcaatgaagagaaatgggaaagcactatatttcagcactaactcagttggggcctcccaatggactgggccctcgtctgtcatattcatggtgtaaccctagtgcctacaatagtgctgggcatatagtagacaggtgataaatattttttaaatgaatgagggaatgaaaatattcagccagcagcagccggacacaagggaaatgtctgactgctggcaataggaccggcgggccagcaaggcaaatgtgggaaggaggctctgccttggttggaagggctctgcctcctctcagtgccctccggtccctcgtccacccccacaccagaacttgttctcagatgcagatgagttaggtctagggcaaatacacttgttgaagaatgcagaggctccacagggagatttggagagcagccccagggctggctgtgccgcttgacagaggaggcccttgtgaccacgaagcacactcgaggagcggtggggtacaggaatcaacagccgtggcaatcgccactctccataatgtgcagggctgcacagaaacagcttccaaggtggagtgagtggtgattgtcaggtttgtgggtttccttggcattaatcttcccggagatggagtcaatttgaaaagcaattttctaaagaggctttatcaagagagtcagtgaaggatgctcagctacaatcaaaggggaaaatacacctggctgtgaccagctgcaccagctgtgtgtagaatgagcagagccagcccaggccggccccatcagccagctgggagtgacctgtctaacacagctgcccccagcccctctgggcaccctgaggggactgttcactgagctcctttaaggctgtgccaaaatatgtgatccagctctgaagtttaagtgaatttggaaataaatgttaaaacctggtatcaatgccggaagcagcatgggagtgagaggtcagcgtgtgctcggccctgtgccacctgggggactgtggaccagcactcccgagctgcagaggcttcctgcacaagttcatgcccacctgactctgctacagggggaggagaaaacctcaccatggccacctgctgcgtgtcgtcatgtgactgccacaaaagcaggcatcttgggcacttgagaaagagtggctgtcattgttactattgtgattattctatcaaaacaatcacagccttataactttttctttttttttgagacagagtcttgctctgtggcccaggctggagtgcagtggcacgatcttggctcactacaacctccactgcccaggttcaagcaattctcctgcctcagcctcctgagtagctgggactacaggcatccaccaccaaacccggctaatttttgtatttttagtagagctggggtttcaccatgttggccaggctggtgtcgagctcctgacctcaggtgatccgcctgccttggcctcccaaagtgttgggattacaggcatgagccaccacagcttcataactttatcttacagttgaagattcataacacaagaagcattccccagggcctcctgggaagcaacacctatttcttgacacaaggcagtttaaacacttacttgcaatgatacacaataaaataaagatacaagccaccccgacaaccccaagtttgtcttttataagactggaacactacgattttgcatgttatctctaataggtcaaagaagaactcttttttttttttttttttttttttgagatcgagtctcactgtgtcacccaggctggagtgcagtagcgtgatctcagctcactgcaacctccgcctcccgcgttcaagcgattctcctgcctcagcctcctgagtagctgcgattacaggtacacaccaccatgcctgactaatttttgtgtttttagtagagacggggtttctccatgttggtcaggctggtcttgaactcctgacctcgtgttccgacccctcggcctcgcaaagtgctgggattacaggcgtgagcctccgcgcctgacctaagaactcttaaacctccagaaagcatgcttcattttctgcagcaaatgagctccagatcatggcctggaaactaacaccctgtgactatttaaaatgtttctgcagagcctctttttgttccaccaccaacctcctcctatttaaccttcttataaattgataattcctgagcatatatctcctttttgctttaaaataagaatgtttcattccttttcttctcataaaagcaatacatggtcactgtaagaaaatcagaaaatgcaagtgagcaaatgaagagagaaacaagaaacatctggaaaatactgttcctaggctctcccaatgccacgatgccagccaaaaaaacctgacctgtgaggggagaatggtgttctttctctaccaagttcgctgcctctggaattcacagcatgcttttaatttaatttcatagtaacttaatattctcagaagagtccagccacatgtctcctctctcagcagacccagctcctgtgcaggaagcagttcacatggcagggcaggatcggggcgtttttctagctggcagtctctccgtggtgctaaaaaagccagactcctcagccaacgtgaaaagagttgttctagtgctgggatgatctcttatgatggaaggagagaaatacagattggaccaaacctgagatgaccttcaggcacaccatggctaagggggtttcagtagatggtgacagtgcctcttgttcaggtccccttcactgggctatgcaccaccccagctactgtgggcattggctgctaactgtggtcttctgcctgtgtctctgaagaatcaccctcaggggctatggaaacctggctgaaataagaatacataaaacccatgctcctgcctccaagcaggacaactgtgtggtggcgttgatgctccaaagccagcatggcctgtgacccccaggcacaccccagtgtccaaggcttctaggaaaatgtgtgattcttaacacaagtttgtgtgtttgtccctactcccacctgtctttcggctttccaaggtgcatggaatatgtctttcagtctccctccatctctcccttgcaccctctatcacaaatgcacaccactcactctcaaataagacctttagcctgggcaatcggtggcctgtgttctagtttccccttctcagcctcgctgtcattttccctcccttagtcttagtcgctaaggccttccccatgagcgtggggctcctgggagaaacagatacgacagccaccatagaagattcacacagacaggaacacaccggcccttgttgttctgccagtgaggctccttcttgggactcaaattccaggctcctctgccatgcccttaatgtcaaagtggtcgccggcctacatctatctttacaataacttcttaagggctttttaaagaaagcaaaagaagtgaggtgactgagcccacagatggaatgaggcccatattctgtatcaccaacgatgacataaatatagtcaatagtcctcagacactgtgcagagggatgtggtaatcagtttccaattgctcttctccagagacagataacacctgttttaggttgggttgctcggaagcagagcctgagattgggtttgagtacatgtgctttattgagggagggcttttcagggagaactgtaggagagtgagggatttgggaggggcagaagtagccaagaaaggatgtggaaccaggtatgtgcatgtggcctgacccaccgggggctttggagcatcaacgccaccacacagttgtcccgcttgggggcaggagcattggttttatgtattcttatttcagccaggtttccatagctcctgagggtgattcttcagagacacaagcagaagaccacagttagcagccaatgtccacagtagctggggtggtgcacagcccagggaaggggatctgaatgaggcactatcactatctaccaaaacacccttagctgtggtatgcctgaaggtcatctcaggtttagtctaatccatatttctctccttccatcataagaagtcatctcagcactagaacaactcttttcacgtagcgaaggaccttatagttaattcacagaaacttcatgtatggtgggctgtggtcttatttctagcaaaagtggctgtctcatctctgattcttagccaattgaagaaatattttcagttttccacaaggcaagcaatgccatttttctgccagagtttctacaaattgacttgtaaagggtctgtcactatgactccagtccacaagggtcctgggtgcaaattgggacagaaaacaaattttcttagaattcagctggtgttctgaattcttaagataatagtgaccactgcacttgacaaatgattagtgatgttttataatatctataatgattgccactcagttacagtctttggttgttggcttgtgaatttccttcttgaaacttttcaagaagccctagactacaggaaagaaaagagagctcaaattcaacacagaactcagagccagggtctctcttcctgttatcattctctgcttcctgcaactgtgcttctcaaagactcccaaagcccctctggctcaactctagaaggaaagcccgattctgggcctggctgcttgtctgcctagaaaccctgtgatagaatgtgtcatttccctcataccttgaggttctggatgaatatttcagagtcctccagagaggtggccagaaaacctgcaaaacaaagctgcagtttccccaactgcttttcctagagcctgtgagccgggaaaaaactgaatgcccttgaaacagaaggccaagagactctctgcctgttgttgttgttcttatcagattcaaattcaacatacataaacaatttagacccgcactgtccagtacagacgcaaccagccacaagtggttatataataacatattagattagttaaaattgaataaaataaattgaacattcatttcagcactcacatgatctatgtttcaattgctcattagccacatgtagccagtggctaccatactagagattatatatatagaatatttccatcatcgtagagtgtcctattggccaatgctggtctagacatttgtaaatatactatgtatatgagtatacatgtatatacacatatagacacgttatatatatgtgcatatataatgtatatgtaggataatttatcttgccagcaactgttcagggcaggaattaatagctcagatcatgcaaatacttgcccacaactggactcgtactctgagactctttgtgctaccctacacagctgtccactgctgggctagagcccaatctttagttattcatcaccttacctgttttgtttctgatcttgttctgaataaatagcaccatctttgagaaatccaggttatggccctcattaccccgacccgcaaagttggcttaatgcctgctttccaccaaatggatggtttccccagatcctgggaacagaaagaccaaccccaccatcactggatccccatagctgatggacactccatacatgattcagcatcagtatccgggggtgggagaggggaatacagcagtactccatgaaaccgtttaagtctatatttgtaaagttcctccagagagtattaatgaactgcactgtatgtttcagcaagccctcccaggttcatggccttggttcctagggcaatgcagaaccaaggcttgactccaactgggcacatgaccactgtctttttgtaaatgtgctttacaagatgtgtgtttaaaaatattttacttatactccaaaataaaagccatattgaggaaggatatttgcataggcaatgggccagtacatgtgccaagcattgtgcctggtattttattttattttattttatttatttatttatttatttttcagcacaggaagataatatttattatattttaactagaaacagaacagatagcaagttcacgaggtatgaatatttttttcttaaatcaggcttaaacaacaataataaaaaacaagtctgcatatatatgttggtcactattataatcttcaagggcacaaaagccagcagcataaagaaacatgaataatgactgagaagttttgatgtgccaaaaacaaagatcactgcgttgaactcctttattttgttaatattattattaaacatttaacaggtattaattattgttatttggcaaaatatccaacatgcacatggtattcctacaagaatcttgccttaatattgttaatattaacactaagtttattcctctccaaaattcaatgagttatgattccactctctgtaagtgttagtgttagtggtaatatgcaaaactgattttgtgtgcagggttaagtagcagattgacttcgcatttggtggccagctgtgtaccctaatttttatctattttcttaataaatttaattacatttcataagccctgagataacctgctaatgattgtatacttttaatctatactttattccactcaatttgaaccccacataataagtcttcaaaattatttacagatggttgtaattaaagcaatgacaaaatttactacttgtatagataagactgataataaggcctttaactaagagttgcatattttacatgcacttttaacttgctaggagcaactcttaaaattacatctatcattctgtcagaaagcagttaagtgcttttcattttgcttacttctatatgtgtaaccagactcacttttttcctcccgtgtaaaacaactgttttttttccttccccaaatattaatacttgtcttccaactgaacaattgctaaaaggaacttagcatttacacagcacattgataactatagtgctcagcagagacatatgcccataataggcatctgataaatgtttgttccacatggaatgaattgtaaggcagctgtttgagtcatatactgttcatcatatactgcaactaattttgtttaactaggaaattcagtttaccagatttaattcaccctcaagtataaatccaaaaactttaaattaaaaaaaatcgatttactaatcctcagaaaaagtaaacaagttaatcatagttgttactatgctattagttgatagaaaatttttaaaaattactttccactaaatattgtgtacaactaagtgaggggaagaaagttttaaaaaatgaaaagatattagctaattctcatcattttctccacatttatccttgcagcttatttgttcatatatttattcctgttaacttctctagctgaaagagaattttattatctgaatggagttccccatcaccttacgtacaaaatattagtgaaaagctagtgtaaatgtaagattgtattttcatgtcatgccatatttctgcatttattttttgctagcattaaatttttcgtatttaaatgatgctgtatagaatatgagataatctgccaattgctatgatattgcttgcttacaatattcagtttttgttgatagctttaaagtatattgcacacttgtcatctagcacactaataaataactatttttgaaaggatacactgacaaattcttaagttaatggctttaacccaacatttttagtcagttaaagaacagcaatggcaaaaacattgacaatacagttcatggtccagttctcccatcttacggtacaggttccatcagatgtggtatcccaaaaacaggagctgctgtgcgaaagccatatgcgctcttctggaccactgcacatttcacaatacatttataagcttttcccagcttaggcagatgtgttaacgataattccactatgcttgcggtccactggttgatgttgttgtaattataatcttcaccacctaaaaccccgtctgcacattctttgacaatattgtgggcttcctcagcattgaggccaacctcgtcgcagtggcgatggtactcctccatggtagcgcctgttctccctgggggcggagctacgcctgtgcctggtatttcatacatggtcttatttaaccacacaagaatcatacggccgggcgcggtggctcacgcctgtaatctcagcactttgggaggccgaggcaggcggatcacaaggtcaggagatcgagaccatcatggctaacacggtgaaactccgtctttactaaaaatataaataattacccgggcacagtggagggcgcctgtagtcccagctactcgagaggctgaggcaggaatggcgtgaacccgggaggcggagcttgcagtgagccgagatggcgccactgcactccagcctgggcgacagagcaagactccgtctcaaaaaaaaaaaaaaaaaaaaaaaaagaactatccacaatgacagtgaaacttcgagtgcttaaataacctgcccaagctctcatgagcagtaaacatagaagcagaattctaatccaaatgggtttattctcaaagtctggagtcttgatgttacaccacgcaatcctcaaatgcggtttccttttttccttctttctactgcaagaacctttgagcttctcccactccaagaaggccatctccagaaaggagattgcctgtaaggacagcctagagagtacttgggcttaacctcgctccaactctcgccaaagactcccccaaagtctcctgatcattcattggactgcctttcactggaattaatttacccattttcagcttttctttttttttttttttttttttttgaggcagagtctcgctctgtcacccaggctggagtgcagtggcgcgatctcggctcactgcaagctccgcctcccgggttcaagccattttcccgcctcagcctcccaagtagctgggactacaggcgcccaccaccaagcccggctaatttttcgtatttttagtagagacagggtttcgccatgttagccatgatggtctcgatctcctgacctcatgatccgcccgcctcggcctcccaaagtgctgggattacaggcgtgagccactgcgcccggcccagcttttcttaatggtagtaatggcagtcatattagcaacagcttctatttatcaaagcacttagcactttgaaagaaagacattatgagttcctgcctcagtctgggttgtcccagaagtccaacctgagacaagacttgggtgctgacagttttttgagaaatgatcccaggtaacacaagtgaggaattggagatgtaaaataaggaaggggagaaaagccaatgaagagtgcattaatgagcgagttgccaccgtgggcagctgagctcagtcccactagggacactgagttgtcacgctgaggaatagagaaaccggggtaaaaacctgtcagtcactgggagagagctacccctcaaaggttaaatccctgccacctttgggccgccctgcacgcaggctgtgcaggcttccacggaggtgggaggaagcccagggggaacacggggagattctcgtgcctggggtgggaagcagtggacgtgcaagggagcttcagctgcaggtgaactcagaagggacttaggagactcaggagggacatcacagcatctactacattctccttccacacagaaggttccaagcgtaagtaacttgctcacagccgggcgtggtggctcacacctgtaatcccagcactttgggaggccaaggcagctggatcacttgaggccaggagttcaagaccagcctggccaacatggtgaaactccgtctctactaaaaatacaaaaaattagccaggcgtggtggcacatgcctgtaaccctggctactggggaggctgaggcatgagaatcacttgaacccaggagctgaaggttgcagtgagctgagatcacaccactgcactccagcccgggcaacagagtgggaccctgtctcaaaagacaaaaaaaaaaaaaaaaaaaaaaaaaagagataagtaacttactcaggctcacacagccagtgtgggaactaaacccaggtctgattgatcaaccccaaagcccttgccctttccgccacctgaagctgccctcaaaatcccttgtaaggtgcacccaccactgcttatcctatctcctcttcactctgccctcaggaaaataccatccactggcaagttggtgctgacactcacaaccgacgcctgtgaggggaaggaaaattttgtccgctacctggagcatgtccaggctgtcatcacggtcaacgcaaccagaagaggagacctgaacatcaacatgacttcccctatgggcaccaagtccattttgctgagccggcgtccaagggatgacgactccaaggtgggctttgacaagtggcctttcatgaccactcacacgtggggggaagacgcccgaggcacctggaccctggagctgggatttgtcggcagcgccccgcagaagggggtgctgaaggagtggaccctgatgctgcatggcactcagagtgccccgtacatcgaccaggtggtgcgggattaccagtccaagttggccatgtccaagaaagaggagctggaggaagagctggacgaagccgtggagagaagcctgaaaagcatccttaacaagaactagcgctgcacatccgcctttcccaccgccctccctccccagctccgcctctgtcctcgctccacgtttcaggcaggcacctagcaattccatcacccgtacaggcaattccgtcttcttaatctgaagcttcactcactgtcaatgattattttcattacaatggaaacaatcttttttactctatgccccaaatatagcgttcccaacaacatccatgtcctatgtgtgactctaaattctttatttctgtcattcaaatgggtgatatcctgaaaaaaaaaaaaaaaaaaaaactgggacagctttcccctcatttttttttttgtttctgagaaaagaacgtattttaaaagccacatagagtgactccaagaacaattgtccatggtctcaaacaaggggctgttacataacaagaaaatcaaagctgaggacagggtgtgagcgccacatctctgaaagcacaggagacactgtgctataaatcctttggggagcgatgttttgaatttagtgagatttaccagggatgtagattaaggtgatgtgattcaaaagatgccattcatagagagccctagttactgcatggggaaagagatccaggaagcatgagtgctggatattttactaccaatgccaagataattcactctactcagccggcgtggcaaatataaaacttacagagcgtggctgtgctctcaccagctgctgctctgagttatgttaaaatccgctagagcagcccaaatttttctcagtttgtatagagttcatcccagccccaattttctggggctcctcacatagctacccaaaagagaaaaaaaattaagacaagcctggcaacacacctggtgaagagtagtttactagcttttcaaacaagaatgtcccttttcctaagtcactttgaggtgtctcaatctgatctgagtgagaggcgacaggagtatttttttttttttacagctttacacacacagatgtgggctttgatttccaagtaatataatggaagagaaatctcatactcccccacagtttgatgtcattaatgtgttgggaaaaaggcctctgtcccggaagagtcatgggaggtgaaaggggcacgtttgaagatgcgagcgctatcttcacatagttctccagttgtatggagcctcttctgccaagagagggccatgcaattcatcccagaggaacctgaggcctgaaggaggtgagagaagacctctgtgaggaaagcacacagtcaccttctcggcaactaagcagtccctgagaccatttaacatgcaacccgaaggttatggtcaatcccaaaagtcaccactccattcccaactagacattaccaaagtgacctacccagagattgcttctcatccccagtcccaatgcacatccattcccaagaaatgctttgtcttcagcctctccaggcaccatctcccttcctgtgggagcagagagcttagcctggagcacctttccttcaagccagcaacacagagcactaggttcaattccctgaaggtggccactttaagagagaaatctgaaaaccccatttgctttcttttctcccatattggcatggatttctgtcttctctaacaccttgtgaccttctctatatcatgctttaaagtgtaataatatgattttttaaaagaaatttattacttgttgcaaaggtctttttaaaccagtttagatttcaagaaaaaataaatggaaatcatcgaaaattcatttcacattaatggtctaaaaataaaccaaaggacattatgtgtgcatgtgtgtataagtgcacacagaaatatatatacatatgtagactatatacatgtgtgtatatatgtgtatatatacatacacttgtataaatgtatatacacatatacctataatgtgtgtatgtgtatttattgaagaaacagataccatactcatttctaaaagaatattcagagaatatcaagatgattctggctgaaaaaggccagtggaaattcaggtgaaaatgttcatcaattcccattgcatcacctctgtaatttttcagctctctgtataaacattaaatgtcttatatagcagcaaaaatataaaatagttgtccatattttcacaggtgtggtgtaatttataaaattagaaagcaacttatcagctacttaagagaaatggcaagttttgatatgagtatacaatatataaaaatatatatagtgctatatatataaatatttggtctctatttcattttttgcatcagtattaatactaaaatatgtctcgctagtgatgtttttatgatatccctgatcctaactgaagagacagttatttatagtcatttattttaaaaaatgaaaataagtgaataataattaggttaacattgttgctccctgtgacaaaattttataagcaaatttcaaaagacatgttgtaaattaggaggctcaacaataaaacattatgctccagaaattatgtgagatgtgctatattgtacatgaaaatactttcatccattctaggaacagataatttaaaaattgccaaagagagatctaaagagcctgctttactaagtatgcataaaagacttataattaacatataaatcatacacaaattattatctacagcagtatttttcaaactctagttacatccattagtgggttgtaaaatcaatttaggaggtcagtttttaataaaatagagtaatttagaatacagtaggagagaagaaaatcacaggataggataggatagaatagaatagaatagaatagaatagaatagaataatcatgcataataaggataagtattgtttcctgaaatatttgtttcagatgtgtgtgtgcacacgtgtgtgtgtctgagtgtgtgtactggatcacaatgtaaaatacatttttcattgtgagtgatggtcaaaaatcttttagaaacactattctaaaatatattaatcaggctagactaagttatgctatagtaacagacaatctcaaaatctcagtggtttaatacaacaaaggtttatttatcatccacacaaattccagtgaaggttcaggtgactccccaaagccacagacctccatgcagtgactcaggatccaggctgtttcaccgtatggtttgtaatcatagcacaaggctgctacaatcaccatgcagaagagaacccaaggaggacattcatctgctcttctatgtttagcctgaaggagacacatgcatcgcttctgcccattgcccactggccagtattgggcaatagccctggctaaatgcaaagcaactgggaaatctgtgacaactaagggaatatttggtgagcattagagtctccactacagagagtgcttgacattcccttaaaacatgttcttaagaaccgatttaacatggcaatcactcttcatggatggtaccatgaacattattacaaactggctgtaccttaccccatagaccacagactattctagaaaaagaccttaataattattcataaaatattaatatactatatttaccaaagttaattataaaaacaatttataattctgtcctctgatataacacttaaactcaattattaaaatcttagccgggcatggtggcatgtgcctgtagtatcagctactcaggaggctgaggtgggaggatagcttcagctcaggaggtagaagctgcagtgagccgtgatcacaccactgcactccaacctaggtgaagagcaagacactgtcccaaaaataaataaatataaacagagtctgttactaaaaatagatattggcggatataaggtccaaggtttgatcttgtgatcctgagacactcctttttaatacttaggtttaaagatggatttccaaaagattaagtttaaaaaatgatttttaaaaattccgatagagttactactctatgtcttcattcgtatcacttataagttaatgcatggttttcatgtgatcagcgcatttgcttggagtgattatatgaaaaccacacagtgtaagaccttcaggacacataagtattttatagttaacagaaagaagtgctgaattaggggaaatggtgatctcacagctaaagtgtttagatgcaaatagtctaatttggtagaaatttctaaaaagcaaaatgcaaagataaaggacagtggttgtggaagagagttaggggatccttaaaactctggaattgtgaaatgccagagacagaatgtctcctaggctaatgtaggtggttcagttgtggccagcagggtggttctttgtctctaaagaataagtcaagagaaagggtgggaggatggagggcactcagcacatgggagcttagaataaatgagagtcagggtgaccaaagctggaagacagtgtctggcagcattcagggtagggaaacatgaagcctgacataagggagaattccagtctctgaagagctgaagtctatcgagggatacaggccaatacattggcaaagccacccccagagagagtgcattaaaacaccaccacttgccaatggtcccattgcatgctcacccacagcctcctcatgccttatgcagcttcccaagaacattaacaccggtataaacgatccaagcagctagatctgcagaaaacaacaccctctctttgaattgtaaactaatcagctagtacttgagtttttccattagtctcttgtgcatttagttgaaccctttccttggcttcaaaaaaccctgatcaaatttggtttaagatgtataagggacctggaatcaaagtctgagaacctagggtaaattctccaagccaaggtcctggctccatgtttctcttagaactgagaagagactcacgtttgtgaacctgggaatagaatgatctcaggtgagggatgcactcagcctaaaaagatgaagattctgtgtggctaaatgtttaatgctcattcatgcatgatttgcggtgggatgggatgggaaggcaactagaaatctcagctcacagagtttcaggtgccagaagagccacatgaggctggtaattccttaggcctaacgtcactgttactgatttccaaccaggaggctttgggccaacctgccctccccatcccaagatggggtgtgccagctccccatcccaagatggggtgtgccacctcacaacaccctcaaagatgtccctctgaatctgagaggatatcccatgagctactcaaactagatggagggaagaagctaaaatttatctttttcttttctggcaccatgtcccaggaccactgatgggccacaggtgacaggcaagctcctggtcacaaggatgcaagcatgagggtaaaggggcaggtacagctggtgagggcatcagcccagtggagtcattgaccaggagtgtatcttctgataaaataagtttcaactcaaaaactctgtttgaatacaacataagtcagtgtggctttttatgttgtttgcttgcttttatccatgcctgagaaaatggagtcaggtattgtaccaatcaagataccaatcatcaatgtgccaaatgccatgtgagttttggggtgacttcattcaccagcagtgtcctaaccacaaatctatgttagaaaaattttaggataaacttgatagtaatggctgcttgaagattttgtttgtttgtttttcggggttttttttcatttaggttttgtttgttcgtttgtttgtttgtttttgagacaaagtcttgttctgttgcccaggctggagtgtagtggcatgatctcaggctcactgcaacctccgcctcccaggttcaagcgactctcctgcctcgacctcccctggtattacaggcgtgtgtgaccatgcctggctaatttttaaaatatttttagtagagatggggtttcaccatgttggccaggctggtgtcgaactcctgacctcagatgatccacctgcttcagcctcccaaagtgctgggactacaggagtaagccaccatgcccggccagatctttcttataatgtaagcttcaagtcgaggagagaactaaatggaatttcccaacatgaaggtggaaggaagagacaggttccaatgccaggtttagaagtgtcttctgagatgttaactgaattttgcggcagactgttggtgcatcctctgtatcagggagtctgcaaactatagccaaacccagtacgcggtctgcttttataaatacagttttgttggagacaactgtgcttgtttgttgttgtattgtctatggctgatttcatgctaccacaagagagctgagtagttacagcagaggctgtgtggcctacaatctggccctttacagaaaaggtttgccaacctctgccctatatctccttggcccacctaaaggttatctgtaggcagtttccatgcatgccaaaggccattctatcactctgcccagctgcagaaaagccccagacctcgtgtggagcaggccacaggtgatagggcatcagtgccctagggccaccctctcctgaggagaaatgggatggagagctggtagacggatagctcagcttcctcacctcctgcttgggacaatttgaagatgttccacccgctctcttgaagggtccccagtgggatggagccccagctgctcacagtggtggccacctcattaatgccccctgcgtggacacatccattccccatctcatgcctcctctttctccagtcaggagacagaaaccataccagtggttttaacagagagaatttaatacaaagtaccatacaattagtataatgaattgttacctagttaattcaaaaagcaaaagaaaacacaagaatcacatggaccaaaaagtccaacatttgtgggagtggggggctcacgcaatgaagatgccctcctggctcgggcaggatcctaaggcatccgtggcaccccagcctgccttacccacccacagtgcccggaagtggagcacaagtgcacgtgttaggacctgaaagatggggagttaagacctggcagagtgaagccagaggaagctcaggtggaggtctgtagtggtcccaatgtgcaaatcagtcatctgacttgggtacaggtgcatgaggccaaaagattagagaaaccacccagcagctggttcatgccaagatttccctcaggaccactggcactctctcaaggaaacccatgcagattttttcttgtaaaaccaacgcttacagtctttagggagaagcccagcgggtggtatggcgctggttatggaatacaagtgcctagtgggccacttcttgtcagcagaccttcaagaagcagctagctaccacctaagaggagaggttggaattaatacaacttggaagtctcagaggtgggagtgtgctgggacccagaccaaggaggggcatcagcaggctagtgcaggtatctctgcagagactgcgatgaggctggtcctgcaaatgctgggaaaatggagaactggactcagctgctgctacaggaaggaactgccactgccagggtgaagaagctgtctcagtccatttgggctgctgtaacagaatgtcatagactgggtaccttataaacaacacaaatttatttctcactcttctggaggctgggggatccaagatcaaggtgccagcaaattcagcgtctggcaaaggcccacttcctggttcatagatggcacctcctcactccgaactcacatgctagaagggatgagggggtctctaaggtctctttcataagggcactaatctggttcatgagggctctgccctatgacctaatcacctcccaaaggccccacttcctaataccttcaccttggggtaaggccttcaacatatgaatttgcaagggacataaacattcagaccacagaaggattgctggggtggtgtggacaagagcagaaagcaaacaaaagccagcgagtgccttcttcctcctccagactttcagtcttcccccagctcccctctaacagcacctcccagggagcagctggctaagcaggacctggctgcagagtcccagccccagcatcactgggtagagaggggcaggtttgaagcaagagacaggagcttactatccttcctgcgacaccaccctaacaaaccgcctgcacccaagacctttctccgggtctgctttgggggacaacccaacttcatccaaacctccttatctgttgatacctaaccttattacttagcagttatctttggggttacaagcaaagaaaaccaactctaactagcgaaaacaagtaagcagtatgtcaaaaacatgtggtgtagccctcaggcctgaagaaccagccaacaccatcctagaaaaaagacagtgattggagcaaggctggggacccggaaacacagcaaggattggcaggcaaccttgccggggtctcaggcggcaagtgccagcacctgcagcctgcgctatactggactcagatttctaatttcattgagggtgaatctgattgggctggtccgggtcactggcccaccctgaggccagaggaaggcagaatatcttgatacattagggttgtatccagtgtgggaggagcggctactcaatacaaaatcagggctgtcacctgagggacgggaggtaggagtggcagatgttagtctgctgtctcaggttgggtcctccagaaggcaaccctgagacaaggagtgaagggcaagtcatttatgtgaaaggaagcatctatatcttgagaaggaaagtgagacacgaaaaggaggaggccaataccggaggcactgatcagtgcatttcttcacaggcatctgaggctcaaacccactggggagctccaagagactatgtagaatatgcctaaaagttaccctaacagcagagtgagagggctggggaagagacctgctcctccaggtcccgtccacccttgattgagggctgctcccgggagcatgaactccccaggacaaccaatctgcccaggtatggaccaagcatgtgcctgtggccacaggaaactctaaggcagagtcgcacacgcctgccgcgagaagctggagtgcggtgagacttgggggatctggcgagacaccctgggtggctgatacaacagcagtgacgggtcactgactcaagtgctgggaagatgagtggggcaggggctaccacacagctgctgtatggagcaggcactctgggagagtcttgctcccaacagacccaaagctgcctcagggaagaggagaccgaggccctgcatggatgctgtcgggaccctgcatggatgctgtcgggaccctgcatggatgctgtcgggaggcctgctctgactccatgttactaacaagaaactctttatgaaaccaaagatttcgtgcgtgtttcaggaccctggggagagagaaagcccagaaatgaacccattctgcagctctacagaagaaaacagaactagattgggaaacagaactagattgggacagtggagtgtcaagaaaatgagcaagtgagtcaaatccctgggacccttgcacagtcagagcccaactaggctctaaagcgtgcactgcagccagccctgcatttcacagtatgggctcaaccttcaggctgaggtgcacctgccaggaaatggtgcttacctggtccctgcctcccaccctcacctcacctccttccattgtccccctgcagtcccctttatgtctccttgaacaggccgagttcactcctgccccagggcctttacacttgcagctctctctgcctgaaatgctctaccctcagctctgtatgtgatataccccatgttgtcattcaggtcccacatcaccccttcacagggtcttcccttaccacccaatccaaactagacccccagtcattctagcaggtcacgctagttgagtcccttcatggtagagtctctgactttctcttcgctacccgcttgcatggcgtttccttcctcccccactagaacatcacatctgtgagagcaggaccacgtcccactgttccttgctgtctcccagtgaccaggaccatgcctggcacagaacagatcccaatccatttttcttgactgattgaatataatataaaaatgacctttctttctaaagcaataccccctgccttttaaaataatataaactgaacacatagttcagaaaataaaaagacccaaggaggaaaagaaaggctttgcagtggctgttgaagctgaagataatagacacacaggcccaaagcctagtacatcctgggctccagctaatggtttctatcattctcccttaagcttttaagttataaatatttcaaaactcagtggaatgggttccccattcatcttttagaaaaaacaacaaaagcctaattctttcttgaaatccaaacctcaaatgaatttggaacaagattgtttcaagctctaaatagaaaggaaaggtgactccatttagtattatattatttgtaaccaagaaataacagaatgtaatttgtgactctgtcaatttcctctaataatgtgtagttgtctcaccagatgctttttgtaggccgatactataacccatttaaacacatttactcagctcccttaatgtactttggtgaagctacacagggaaggagactttttttaattggcataacttatttttggactgtgagtacaaagatagatactggagggcaacatagacatttgtgtaaagattctggttttgagtaatttctgtgttttaggatgtgacacagtaagtacctgtgtgcatgtgtgtgtgtgcacacgcaagatcatgcacactcacatggccactgctatattatggtaattgagagcattgagaagtctgaaaaatcgccccttaatggcacagcacactgtcaggcacatagtacatgttcaataaatgcttgctggactaattaactcacttctaaacaaggaacttacacagtgacacttcaccttgcttcttgaaacctgacctaggttgcaatctctgagtgagaaaattttaagtatctcatactaagtacatttggtacccatatggtggcagatgacactggtgcactgcctatgaccccttgacccttagtacttccttgtatttccaggcctgacttccaaatgccagcacctagacatctttgcctgagagctttcttggcccccagagagcacacctcccactgactgccaggagctggaggattaataccccagctccctcacccctcagggaggctgactctgaggcacgtgatctatgctgtctgccagagctcctcagtggcccctggtgtgagctgatttggtggtaacgtcctccttattggttcccttctcttccctgccttctccactctcctacttgtgcatcctaaattcatcttccaatgaaacttcgcattctctgctttgggatcagcttctgggggaatccacattaagagagatgcctttaataatttcatctctagcaaaacactcatccacataagcacacacttgtgcttgaaatggaatgaagatgagccgatgtcatcaaccagcatgtttctgtgtgaaatccagatgctatctgagtctctaacgagacttatgaaccaggatgaagagcatgtctctttcctaaatgaggacggtatggtggccatttaacagagcatccctgtcctcatgaagctgacccacctacattcccaaggtccctattaattagacaaaggatgtgcaagcaaagaaaacattttaatgaaggcttcgttggcaatgccagatgggtcaactatggtctaatccaaacaggaaccctcacccttttatcatttgctctaaaatatcaaagcattacccctacagtggccccaaatacattttatcccatcaagcctgggcattttaagagctcttctctcctgatttcttcttgtctgactttgtctttccaatcatggtctccacgatcacagcggtttcttcatatgtctgaatgctctccgtggaaatcttctcgatagattccaccacttccactgtcttataggccaaagccttgggagggcctttttctggcaggcttctgctcctagtcccaagcacctcagctccatcctgatcagccgcaggctttggaggctcaggtatagatggttcctctgcaccgggtgtgaccatggcacagggtctcctggactcttcgtcccgctcctcaccctcacgtttctcttcagggccttccagctctgcaccatctggctcaatctccttgtctataggctgctggtcaattggttgtccatcttctttctcctgcagacccacctgcccattctctaaagggggcttgggtgactcaggagagggctccacctggccgtcataaagcacagagtcttccgcaacagaaacagccaccccacctttagctgtgatggaggagacatagaatctagggtccacgtaattggcatcccctgtgaccagcacgtgccgctctttggtgtagagctcagtgggggtctcaggctctttggggcttctcactttctccttgaccttcctgtatagtttcccaaagcctttgcttatctgccctccatctggcacatcctctggagccccttcttgtgtcaggggacttacttctttactttctgattcaaacttagattcactttcctctttaagtaccacctgtaccagctttgtgtcttccaaaccttttaatggtgcatcttccagagctccgttggttttgtcttttgttataatctcttttctccttggaacattcttggggagggctttttgtcttggttttgctgctgttatatcctgcagagctctggtaagatctggaaaaacacacaggcagaaattcaagtataattgtcactgagagagaaagaaaatacgctggttggaaaataggctaactctctcggaaacaaacgcctatagtactagggtggggcttccttcatctggagcagaagcaatggaagaaaggccctggctttgttgctccatggcccaggctgaggtccagctgggcgactctggacaagtcactggatgcctttgggcttccagagggaaggtgctccctgttctgacacccacagttcaccaccacaccaggcagaacctaccaaggtatgcaaggccattgtcctgacactcaatgggagccctagcccctgttcccactgcagccccactgagctcacagcagacacttggatccacagaagcccattcctcaaagttattctctcctctgacttcctcaaaggagagacgacagagctacctgggggcttctgacatgctcagatggccttgggcctggagatggaacccgttcacggtggatctacctcattccataattagctcaagctagataaatgccacccggctgtgatcagcctccccttcctcccaggccaagagaagaagcgatgctatgaaattcagaaatgacaggaatcccctgccccaagtccaccctcctgcttccagactagctgaaaggaaaaactaaaagttgaagaaaacacataaaattctcacctggtataatctatgaggcttcccggctccacccacatagtgaattttgaactttttcagcccaaaagtcatcccctgcatcccttcccactggtaaccacagggcaagaccgatcaagcaccggcatcaagcacggctgattcacaataaaaagagagccaggtgagccggcaacagcagacatgggtcacaaagccacaggtgcaagggatgcagagagggacagggcacaggaaaactgctgggaactggtatgcgaggaggaggtgcttacaggactgcacagaatctcagggcccagtgccaaaaaaacccacaagaccccttgttccaaattattaagaacttcagaacagcattagcagagcattcagccaagctgggaccgttctgagagcaagcccctgcagggccgctcgtctgcagacctggccctgggcgtccagctgcaaggctgttccctttccaaccatgttgactctggaacaccatttccacaaagccctctgagctatctggaaataaggatttcaaggccctatatgcatgagcatccatattaccaccttctcttttctccccaaatgctgcgcttgttcagaactgggagatttcgatgtgaggtgaggtcttacagaccaaatgttgaaggcagatgccacatttaccagccaagctgtttctgcctggtttgagggaggggagaatgagagatgactgagcagccactctgcactggacaccatgttacacgcgttggcacaaaccctttgattcaatgtggggaggcggtgggatgtgatccagtgttcacttactgccgagcggagggagcaagaagtgaatattgagttgtactttttgcccaattaaatgccttgtgttgcaaaagttattgctgtcaaaccataaaacaaatataaaaatacaaaataaatgcctcacattagggatggcatgcccaaggtagcctagccccctagtcgatttttctccttataaacttctcagctcagtcacttagcaagccagagagggcagagggtgggaaggagtcctccttcacataaaagcatttaatttccagatggatctgaagcaagcatgaatgttaaagtcaggaagagagccgcttggtttttttcaagacagaaaaaaacagaagtccagtgttggggagcgttacctttcccaccggatccagtgctgagagagactccatggctctgggtgaacaggggaatgggagtttcaatgaaggcagaggtcagcctggcagaaagaaccagaaagaacaagccaaacagaggtcaggggcaagagcgactctcgttaatgttgagcaaaaatgaaaaaaaagctttctctagaccaaattgctcacgaattagatatcattttaaacagacagccatacacacatttacatactggatgaggacataaaggaagtgatcatttctttgagctcaagagtcataaactgtgaaacatacctataaaaaattgtaaagtggggattgcttataacctaaaaatgccacttctccatgagacagtgccttttttatttttttgccttttgtttttttgcctttttgatttttttagttagagtagtcaacccaggctgaagtatttagggcaaacagagtatgatatctccaacttaagatatatgtatatatacgtgtatgtatatatatatacacacacacacgtatatatacgtgtgtatatatatatacacgtatatatacgtatatatatacacacacgtatgtatatatgtgtgtatatatgtatatgtgtgtgtatatgtatatatacgtatatatatacgtgtatatatatacgtatatatacatatacacacacatatatacatatatacatatatctactcatatatacgtatatacatatatacatatacatgtacacacacacatcatatataaatagagaaaaaatgataaagcaattgagataaaatataaacaactggtgaatctggagtattcaggagttccttgttctattcttgcaacatttctatcaatttaaaattagaccaaaatcagaacttatagataaataaaagaggtatccagtcacctttctgtgaagccctgtcccaaaacaaaaatgtttacaaagtcaccgaaatgccagctccagacttattcttgcagatgtgtgcatagtgttcactgtgacataaatataatgtggaatcatgccagatacaccgaccagcactggagaaagaaaaataaaatcctgcttctcctgccaagcattcgagtgctcacagccaagagagagcacccagcgcgaagggaagagctgctcctggtggggacctcagttgtggggggcttctcttttcattcagtcgaaacccaggaatttagcaagactgaagtgaagaatcacaaattaattcccaacccgttctctggaaatcaccgtagctatgaataccagcatagctggagagaaagagagaatttcccagctttcttaaagtgagtagggatcgactcacagctccattatggagaagaccagacagccacatagtcacagccacagactgactcagcaaggtgctaagaattgtgaggatggcagcaggagcatcaccaacacctctgagtgccctcaagtgccaggctccgtgccacgtagctcacctgcagcacctcattaaatactcctgggcatcccacctgctgggacacttatgtccccagaggcctatgagcaaaacacaggcttctcagtgaggccttttctgaccaccctacttaaaactgcaagcattcccccatcacccctattgccaccaccctcctccctgcgggaacttcctcctcagcactggtcgtaccttcatcctctgtctcccctactagttatccaacacccatggggtcaggaattgttctgtttccttccctgacacatgcccactgcctataactgtgcctggcacacaataggcactcaataaagagttgtggaaggaataagtggcctggatggggagggcacacgctcacctgttgccttcaatctcgatgatacgatgataccggtccagctcattcttcagggtttgctgggcgaccgccagctgccggcagtcgtaagaagacttctccaggacccgctctgtctcctcaatctccttgcgcagtgtctcaatctgctcgttataaagctgaatctcatcgtcataacactcatgggcacttttaatagcttgttccagagttgttgtctgtgggcaaggacacgctgtaagaaaatccatcccccttcttctctaagagacagacctcaccaggaaaaggaacctggactcggtgaatgttttatgttgtttgtgtgtttctctgtccattcgagattagcaatgaatcactttggaatccttaagctaaaaagcaatgtgaaaactgagctcctgtgtccttacacaattttttttttttttttttttgatagaggatctcactttgtcaccaggctggaatgcaggagtgcaatctcggctcactgcatcctcgacctcccaggctaaaggcttccacctcagcctcctgagtagctgtgactacaggcaagcaccaacatgctgggctttttttttttttttttttttttggtagtgatagggtcccacttcgttgcccaggctggtttcaaactcctggcttcaagtgatcctcccacctcagcctcccaaagtgctggaattacaggtgcgagtcaccgcacccagcccttcttgcactaatatcagcaccctctgcaattagtccataaggaggcccaccccaaaggcagtctgaagacaaacctagaaaataaaacgaaacctaggccaggtggctcacacttgtaatcccagaactttgggaggccgaggctagcagatcacttgaggtcaggagtttgagaccagcctggccaacatagtgaaaccccatctctactaaaaatacaaaaattagctgggagtggtggcacacgccataatcccagatacttgggaggctgaggcaggagaatcacttgaacctgggaggcagaggctgcagtgagccaagaccacaccattgcactccagcctgggcaacagagcaagactctgtctaaaagaaaaagaaaaaaaacttgctatcggtggaataatatgtataattcaaataaagtacattcttcagactttaatgaacaagcataaatctgatagcaaaaaaataagtaaaaagaagcacatactaaatagataagatgctacctttattgaaatactgagtgggagaaaagtttccttgttctcattcagctttgattttctcccgagtttggatcggcagagttacatttatgttttggtagctaaggtgtatgtgtgtgcccttgtgtacacataaaataatgtcagagaaatacagtacattaatcagagcaagtaaaaattaagggaggaaaacagaaagagatagttttatattcagtgtaagaggttgtgatgatacacaaagacccacaaatgctcagtcatgggccacataacagtactgcagtcaacaatggactgcatataggatggtggtcccataagagtacaatggagctggacaattcctgtcgccttgtgacaaccgcagccatcctagggccgtggagccatacgttcactcacatgtctgtgaggacgccggcgtaaacagactgtgctgccagttgcataaaaaaaagtctagcacatgcaattatgtacaacacataatacttgatgatgataataaacaactatgttactggtttatgtatttacgatactacactttttctcattattttggcgtgtagtcccacttttaacgagatgtttctggtaagacagtgacgccgcattaccccagccgcagcctcctacagctcacgtttcccacagctcttgattgcaatattttctcttgtgcttgatcaagtgttattaaaaaagagtcaagaagcttaaaaaaaatttaaactttataaagtagaggccgagatatcatgattcttttccaatctcattcttgagtaggaaagaatttgacacgcatggtcctcaaaaacaaaacaaaacaaacaaaacctcacttctacctagcgcagcccttctggaagccagggtgcactggaaccacctgagggtgttaagagtctgactcagcagggatggggggccggagactccgccttgctcaccagttcccacgtgatgttgatgctgccggtccatgggccacacttcgagtcacaaggggcaagacacacatctatattcaacttcatgtatgtccactgcaggcatttcctacatccagacctaaatgtacctactggacaccctggaagatgatcattgccatcaaaacccaattcttcacttatacactttatgcccttggatcatgaaattccttaagtgaaaatgtagctttcaaaggtgttcggcaaatggccgggtgtggtggctcacacctgtaatcccagcacttaaggaggccaaggcgggcagatcacttgaggtcaggagttcaagaccagcctggccaacatggtgaaacaccatctctactaaaaatacaaaaattagctgggcgtggtggctggtgcctgtaatcccagctactctggaggctgaggcacctgaacccgggaggtggagtttgcagtgagccgagatcatgccactgcaccccagactgggtgacagagcaccccagactgggtgacagagcaccccagactgggtgacagagcgagactctgtcaaaaaaaaaaaaaaaagcaggtgttcagccatagatctgttgcattagaagggaggaggaagggaagaaaaggtacgtgtgctaagcactttggggagatgtctgtccagtccacgttgtccctgtgtctgatgtcagccccacccatccaaaggcacggtcccagcaacaagatgaccccactctcctgtgcagagttataggaccaggggtgggcctgacctaggctggcctgtcacatgccttctctcctgggaatctggaaaggggtctcagaaatcgcagagttggtgggaggttctagacaacagggacacatgaacgggtctgaggctgccgctctggagtggcgagctttcatgtgcatggcaaagttgagaaaggtaattatttggagaggaaaagaaatgaagccgaaaggcaaagacaaacagaaattagggagccatggcaagagaaggaagagatggaaaaggagacggagagcggctgcctcagctcccagttcctggttcctgattcctgatgcacacctgctctcagatttcatgccctgccttttataccctgctcctttggaaaaaaaaaaaaatagtacctttccggtggagaaaactggcagacagcaccttaaccaagtgatcagagttattgtcacctgtatgaggacacagccacataacgaaatactcaggacacagcgtcactccatgggggtcttgccaagaatgcagaacctccatctaatcctgagaaaacatcagggaaacccaaaaggagagacatgccacaaagccactggtctgggttcttccaaagcatcacggtcatggaagacagagaaagactggggaccatcccagtatgggggagacaatcaagacatgacacctaaatgtgagtaggatctcgaccaggaaaaaacacgcgtggagcaactggtgagattttagtgcagtctattaatgcgacaggatcactgttaatttccaggtttttatcatcggcccgtggttttgtggaagttgggtgaggggtatatattggaagctactgtgctgtttttgcaacttttcaaaaatctaaaattacttctgaataaaacaagagtccccttcctgtttcagctagtgtgatccagtttctgtttctcccaagaaatctggattcaaacagtcgcctgtaatagcaaatacaagtcagacacactaacgcctggtgcagccacatctcacccacaccagagtgttcagacactccaggaaacactttcaaggaatatggggattgaaaagacccctttgagccccaaatctcaaagaagtgttggaattacatggtgagggaagtgtgtggggctgtagagaacatagaggggccatgtgttgagggatggggcgggagggctcatgagacagactattctcacttttaatttttgagacaggcagggtctcactctattgcccaggctggagtgcagtgctgccatcaggactccctgaagcctccacatcctgggctcaagtggtccccacacctttgtctcctcagtagctgagaccacaggtgaatgccaccatgcccagccaattaaaaaaaaatttttttttgtagagacaaggtctaattatgttgcctaggctggtcttgaacttctgggctgaagtgatcctcccaccttggcctcccaaagtactaggattacaggcgtgagccatagcacctataatctctcacttttctatgtttgaaatcttccataataaagagtaaaagaaaaaattacatatgaagagaatgtaccccagatcactgacccaagagctctggggtggccgttccttttgggtgtgggttccccagcccagagcgggggtagtggctcatgctgataagtcctaagctgggtcaactcatcaacctcacaacaaccttatcagggaagggctgtcattatttccactttacagatgaggaaactggggcacactggcaaagtggcttgcccataaataccacagcaggattcgaatctacctgaacaaggtctgaaacacctcccagaaccaggccacccttgccctgcacctcagcctcctccctgctgcaggcaacaatatgcaagcacacacgtgcgtgcacacacacacactctgtctccagggcccctgcaaactccccattcccacacagcaacaggccaacaccagcctgttctctctgaagacatgggaaagtcagtgtgagccatgcagagacctctccttgcaggttttcacttagcaaagttttaaactgtaaatagaaccacaaagcatcacagaatgggaaatgagagcccaggaaagtcacctgtgatctttctaccctacaagtggagtgcaatctttttatgtctcaggaagtggtgattgttgtttttgtggtagtggtagggggtggagggatggggtgttttcttgggtgtgcatttgtgtttgtttgaagaaggctgcatgttttaaaggctggagatcctctgctggaacactgcgggaggagctcctgtcctgggcgcccccacagcccccatcccccacatgaccatgaggcccagagccctccaactccgtactggtcgcagatgctctacgggattctgctgagtccagtgaagtgatgacttggtttataaaagtggactgatgtctataccgatgtggtttttacagctccataatttaaacctttcatcagaaggaagagtgttcaggaaaaccagtaagagctcctgtctcaggagctcaacaggaatggagatgcctgtgacgagagccactgtggcacggcgtccactgccacccagcaccagcctggccgaggagaatgagacacggaccctcctctagaaggccgcagtccagcaggggaggcacgcccagggcatctcagaggaagaaaggggcttccaggaggaggcaggaccggtcctgggaaccgaggaaggaaagggacttccagaaaggagagaaggaatgagcaaaggggaggtcccagaaactgcaggaggggtcaggagacgaagagaagagaggttggcccagggttcctccaacggtggggccatgtggcaacctgaactttatccggagccaggtgactgctgtttctgcctggaccgttagattgcctggtttatatctgtctccccactgggctgtgagccgctgagggcacgacacaggcaggagcctgacgcgagccccatctggaggggtgagctctcacctcagtccttaggaccccagacacctttaggtgtaaggttttttttttgtttttgtttttgtttttgttttgtcttaaaaaaaaaaaaaaggaaactcattacatactgtcttacacaaactaaaccactagatggtgctaagtgactttaatgagaaatgagacatgggcggttcccactttgcaattttaaaaagtgactttctttacttccctgtcacagaaactctcagtccatgcaatttagggaactagaattacctgtcctttcctctccacctgtccgaagtgcttcctccggggctcttacgggtatatgtgcacttatttgaaggagaggcttccagcttccagctccaagcccaggcactattctcccatcgtccgcccagcgtctcccagactgagcccgcagagccacgtggagggcttaaacaaggcgcaccggcccgccccagagctcctgggtcagtggtctggggtgcctgtgaatctgcatttctgacaagttcccaggtggtgcccccgctgctgggacggggacctcaccctgacgacccctgctgtggagagttcgggaagcttcggacgccctaaccataggcggaacccgctgccacggccctggtgctagcagacgctctctctcggcccgccctccaccgagttccggccacagagcgggccctgcccggcggtgtgcggccacatcttccttcagctctagcttagctgctacattgggaagccactaaaacctttaaaaccagcaaaaacccagccacaaacatttgaaatgaggcccaagcctgggacacagggggaccaggtggaacattcgcccactccctgggacccgcccttaccctgtggttctcagtgtggctcctggaccagccgcagcaccatcacagggacacctagacatgcagcatcccgggccacaccccagacccactgagtcaggagctcccgggcgcacccagccacgtctgggttttcatcagagctaaggaggcagaattttggcccccgtgaccttttccccttggtgctacacccttgaatatgttacatggcaaaaagggactttgcagatataattaaagttcttaatcagttacccttttttaaggaaaggagtttattcaagattatcccctaaaaacagaagtcagagaaacgtgtaagtccaagtcattgagatgagacgcaggaagagggttcagagttcgctgccggctccgaacgtggaggggcctgaagccaaggagcctgggcagccctgacagccactcctggccagcagccggcaaagaaacagggtcctcactcctgccaagaacttgaatgagactggaagcaaattctcccctaacagcctctggacaagggcccaggctggccaacatctttctttctaccttttgagacccagagcagagaaaccgataggacccacccagacttcccacctacacaactgcgatgacacgggtgctggtggtgactcatcaaggcagcaacagaaaatggacacagccgtgtttcatcagctacatgctatagcttgttactgagtgagtataagcacatctgtcattttatttaaaatgattcagtaatattttgataactgttttaatataattagtttctttttttttttttttggaaacggggtctcattctgttgcccaggctggagtgcagtggctcagtctcagctcactgcagcctcaacctctccaggctcaggcagtcctcccatgtcagcttcctaagtagctggaaccacaggcacgcaccaccacgcccagctaatttttgtattttttgtagaggtggggtttcgtcatgtggcccaggctggtctcaaattcctggactcgagcagtccactcaccttgccctcccaaagtgctggcattacaggcgtgagccaccacacccagcctggtttcctttaaattatctgtattttattttatgcctttaccatcatttttctgagaagcggtctccatcagaatgccacgggtgggagtggaggaggcagcacagaagagatgtttgagaccctgctttagagacgagggcagcagggaaaagccaggaagtcctcctgcagccactcaggacagaaacaggcggccaaccagcggtttcatttcatgttctcagaaaccaggttaatctgttgtgaaatttcttattttgatattcaacaaatacctgtacataaagagaggaacattctttttgtcctggaactggaatttgccatctaggctgggctccttcatctttctcagtatctctagggcagtggttttcaactttatcaccaccgccccaggaaaaaccacatttctcattgcgagccatacacatcagataggtaggtgtgtgtgtgtgtgtgtgtgtgtgtgtgtgtgtatttcaacatatccatatggatatagagagataaaacaagggcttcacaaaacaaatcctccctttcacttgctgtacactctgtttttcttattatattttagtctagcattttgttgacttccttttacatgccagtcaattctactgagttcattttacatccaaaaatgagttgtcactagccatttggaaaacactggtctctaggaccacgactgggcttgtatccacgtccctattcacatacacagcacacacacatacacatgacacacacacaccacacacacttcacatacacatcccacatatatcacacataccatgtatatcacacacacacaccccatgtacacaaacacatacaacccttattctatcctgtcagagcctcagaagaaaccacacaggccccagtcaccaggatgaggcacatggtccctgagccagggtttgtctcacaagaaggaggagttttaagtgccttacttggttcctcctgctgcgatcgtcagttcaggggaccaccacagacccgggtttgctttccagcagcccctgagagctgctgcactgtgagttttgtgtggtgcgtgctgggatgggaattaggatgtgaactccaaggtcccaaaatgaaatcctgagcagacatgggggcactggaaatcaataaaaagcgctacatctagttgtggcttcacatttttagacagagtaacacataacatccaaatggtccaggctttctgaagtgtccgatttttacacgttttgctctcttgtccccatgtgtacttgtcaaaccaaatgtcaacttactttttggtttgggaaatgtggttagagagccatacaaaggtgcagtattttaacccaagcgtccctgtggaatgacctgctgtagggtaatgagaaagagagagaaccggaaggaacaaagaagatgagccggcaagtagccaagaaggcacaggccacaggacagtttggggcttttctgttttgttttcaaattaagcttcacccaaaaggggtgggggtagaaatgtgagctttccaccaacacgtttctaactagaagcaaacactgatacaaccactcttgccgggttgtaatcaaattccgaaggagaactgttaccatgagaaggaaaacagaagcacagatttgaacaagtggaggataaaaatccctatggtgtccgtttcttcttattcttacgaagcttgacctgggcaaaatgaatgcatgatgtagacactggggcagcctaagcctaagactcggtggggagggcatgactcgaaggagtcccaaggggcacctctgaggggccaggaatgagcgtggcacctgtgtcccccagctcaggactctccctgtgtcctggaaaactcctcagtccaggccagagcagagcgcttggccacccactcagaaaaccccgtttctgccaggaacataggatatgttcagcgtgtgacagctcctcaagctgcatgcgtgtgcctgcgcgtaacacctccatgaaacatgtgggaagccccaatgcacacgcggcagactcgagcgtacctgtgcctgcagctccactctctgcgcctgcaggtgggagagcacctcccggccctcctccagctgactccgcagggcggccacctcccgctccgtcaggagcttctcctgcacagagaaggccagagtcagactcatgggacatgcagagaggaaaagggcagagaaggtgcggggccctggtatggacggaatatccgtgtccccctgaattctgtgttgaagccctaactaactcccaagatgaaggttttaggagacctttggaaggtgttagggttagatgaggtcatgaggatggggggccccatcatgtgattagggtctttgtaagaacaagaagagacaccagagcccccacccccaccccctgtctgtctgtcacgtgagacacagcaagaaggcagccgtcttcaagccagaaagagagccctcaccagacaccaattctgctggcatcttgatcttggacttccagcacccaggacagtgagaagtaaatgtctgcctgtcggccctcccatctgtagtgtcctgttatagtagcctgagaagactaagccaggcccacagcacagccatcaatgccttttgctttgtcttcaaagtctgaacctccttgggagtgtgacatgccgggaccaagtaccaggagaccagagcttagacctggctgtgccatgaacctactaagagactctagaaaaggatttgactctcaaagcctctgttttcccttctgtgaaagggaaaacctggaatgcacactctcgaagaaaatgaaggctggttggagccgcgagccatacgctgtgctcggatgtcagcgcagcacaaagcaggagccatcagccccagtgggtgaaagggaagtgacgctccagggaatggctagaaggaaatcctctgacctctccacactctgccaagcaggtccctctctcctgacctgcctttccacgtctattcaaaaatattcaaattgtttcacaaaggcctgactgctcaagagccatgcattctgacacagagcacattgactcgaagccatgcaaaatcaaacaccaagtctacaatgagggtttctgtgtccagaggctgcatggaagacagcctctgcttcaaacaccttacaaagtggctgcagcaatgacatagacatacaggaaagtgaccgtctaacttgattgtagaattgctaagctaagactcataaagatgtgacactttctcaatcggtgcttctctatcctgagcatgcacacgagtccctgcggatctggctaagatgcagattctgcctcagtgggtctgaggctggactggacactctgcacgtctcacaagcccagacgatgctgatcgatgacatcaaagtcagtttagtgtctgtatacttatgacttagaagggtcttattacatgggaatagatgatacaattcaaaaggtatgctcggatgtaaaacacctttgagttagagttgggtttgaaaaataaaagtaacatctctggaaaggaatctctgggaaagaaaattaaggcttcaggaaaagtttttttaggcctttgtagcaacatcagttacatccactaaggagaacaggatcctgaaatggtaactggtgggcaattcagacaagactatcctcatgaatgccaaaaaaagtaactttcctgtcgcttagatgatactttgcagggttcaaaagtgtcttctaaagcaaatttggggatttctttagctttgtataaaataattaagacgaaaaagttcaggcagccggtgaccccagcccatgggttctgcagcagtttgtctgcatgctggtcctgggcaggccccacctcctgggaagcccattcattgactcggagcatggcctgagcacacatctaggcaatttcaagtgtcaccagggttgagagccaccatcctaggtcatccttgcaaaaagacccagaaccttatctcttgaccaatccaccaaaccctgtagtagcctaccacaacctctgaagaagggacactgtaacatttttatttaatttgcatcatttccagtgtttgtggggtttttttgcttcttgtttgtttgtttgtttagagatggggtcttgctatgttgttcaggctggtattgaactcctagcctcaaatgatcctcccacctcagcctcctgagtagttgggattacaagcatgagccacctcactcagcaccagtctatatatatatatatcatgctatgcatcacaaaattccataaaccatattaggaaaagcgttactatcccgttgagcagctagagagtcaaatgaagaaggaatttggaacataatatcagaagtaatttttcatatccaaatcttaatttttacaaattggcttcaacaatctctatcctttcccactagtttcaatgccacaggctcacataatcattagcagagctccgtcttggaaatatattcactaattatctgagattatctgtatttgaaattcattatcagattgatagggagaataaggaaacaaaccaattttttaaatgggcaagaggcttgagcagatacttccacaaagaagctatccggatggcagatgagtgcacaaaaggatgctcggcttccttagtcattaggggatgcaaattaaaaccaccaccattagaagagcaaagacacactacaaagctgacataccaagtgctggcaaggacaggaagccacagaaaccctcacgcattgtgggtggagatgcaacaatggcacatcgctttggaaagcagcttggtcatttcttataaagtatgcaaggaagaacagctcataattctcaagagaaaataccgaagaaaatggtcaaggatgcggtttacatcctcacatgtctaaatattggcatttacagtacaagtaaaatatcagaagaagaaacttcagatgagaatacaaggcaggagtggggagtggaccctggtggccgccctcacagtccaacctgtgagcccttccctgggagtctccaggtacagcttccctccagggctggtttgccttttcctgcttcaattcttacctccctcatcccactcgtcacaatggatgctggaggagtggtgtggatgatctgctgcaggatgctgatataggtctgaacttccagaagattctgttgggggagggaaaacattctcattataagttgagctgcgctggtttttccttctagtactagatgagaacaggaatggacacttccgcacgctccctcatcacagacaggacagaccatgaccaggttcaggaggaagaagagactgatgcatttgctgccatgggtgggcctgcccacatgtgcaccatgctcattcctggcacctcagtctcctttaatcttcacaagaacaacggggccgatgaataaactaagacttgccttatttcactgtttctcttcagttacattggtgcattggtcttcacaaagccctgggtggcggaggcacaaaaaaaaaaagagaaaaaaaccagccctcaccagacatggtggctcacacctgtactcccagcactttgggaggccaaggcaggtggattgcttgagcccaggagttggagaccagcctgggcaacatagtaagatcccatttctacaaaaaatgttaaaattagctatgtgttgtggtgtgcacctgtggtcccagctacttaggaggctgaggtagaaggatcacttgaacctgggggtgggtggaggctgcagtgagttgtgatcaccccactgtactccagcctgagtgatagaatgagacaccgtgtcaaaaataaataagttaaaaggccctggagggcacaaaggaccctttccaacaccagcagtgtttcaaagaatgggctttggtcaatcaggcctggactaaaagacttactggctatgtgtgacctcaggcaagctatttaaacctcctaaaatgcaagttcttctgtaaaacagggataactatctgtagggatgctgatcccctttacccgccagtgcccctgtccccagctctgtaataacagatgacacagccctctccagaaagcagcccttggccaacaaatggtcatcttgtccaggaagctaccaggccctgcctcatccccaacccaggccaacgactgacagcacaggagtacaaaagaccaactctctcaactccttgagggacccagctgtggtgtaattcacattcacactccagagcttcctgtgggatcatgagaaggccacagctggactccggctgaggacaagtccttgctctgctccctgccctgtcctgcccttttcctccccttctcagagccctccactaagacatcagtgacaaaaaatcactacctagagctctgcttagaggaagcctgacctgagcagtatttcacaaggctgctcttgggatccagtgagatactacagggaagcctcacagtgtgagcgatcatcatcaccgtcatcatcatcatcatcatcctaaatggcctggaagaattatttgagctgcttcaaaactggcccaggcactgttcccaggattccatcaagtagggtagaagcaaggaggtgggtggggaggaggaaatggctgggcctcatggaaagttggagggaccctgattggagcagacaggcctggtgtactgatgcaggtacacactgaggtaggaagggaactggaagttcactgagcacttgccaagctccaggttgtacccatgttcccacattgtcgtagtttgggtttccccagaagcagaccctgagagagggatctgagtgcaaacagttgactgggcagtgatgccaggaaacatgacgggtggagtgggaaagtgaggcaggaagggagagcagtcagcgagggctattaccaatggatcaccactgtgggcacctggagctcaatcctggtgagtatctctgggtgccaatgcagaacaaaagcctcagagttggtctacaaaggcgagagggagctggtgtgtttatacaccaactcccatcagttctggttgaggctgctccctgctcctggggacaggagttccccaacaccccactacaggcggagcagcctccagctgcttggagaaagtcctcaggcaaagctgcagggatggcagtgggaggaggccagagcccctggagagggaagccctgaggcacccacaggtctgctacactacttcacccacgtcactgctgggaaggagagcctgcatttgcattttgaagaagaaaaagcagctcagagaggttaggccactcacccatagtcaaacagctgcagaatctgatttttcaattatgccagggccccccagaatcaggcctgtgaggaactgttggaggctgggggagtctgagcactgcaggagaggaagctcctgaataatgtgctcctgcaattaacgggctcagaggcagagctaaaaacaagactttttcatgtattttctgagcggaaacagttgatggactgtagcttaatgaagacagatctatataaaatcactttgtaaattatactgtacaatatagatactagttcccaacaccagggccctcaaaacacacccactactgcccactcttcaaagcacatctagctcagtaagcactgtccagtgaccaattcacccctatttggttcgagggaaaacgcacaaaggtatgccactctagcagtctgttttcagccacagtaccctcggcttacctgatcaaacccaaactgggttttctagaggaagggcttcaaggggtcatgattaccttcttgtgcctgtcctttgccgcactgatatcatcttgcagaaattgggcttccagctgaaggcgtaggttatgcagcaaggcttcatcagcttcctgcaatgagagccacatatccctggccacaggcaccatggagcataggggtaaagctggccgggtatatgagcacacagaccacctgggagcttactgaaatgcagactctggttcagtaggtctgggaggggtctgagattatgcattctagcaaggcaatggcttagcccattggacctgttctagaagagcagttctcaacagagggtgattttgccccccaaggggacatttggcagtgtctagagacatttttagttgtcaccactttagtggtagggtccttctattggcaactagtgggtagaggccagggacactgctaaataccctacaatacacaggacagcatccccccacaaccctgcacacaaggaattcccttgcctaaagggtcaatacagccagggttaagtaaccttgatctagaaagatcggagcgctaggtatatttacataccaaataaagttaatatttaagtaacgtctatatttgttctatatctcatcatcagtgagttgggtttctaagactgaaagaaaaaaattgttttcccttaaatcctgaaatctgtattctagcagttttctcccaaggactgttaacatttaccttgagaagatgcatctttcatacaaaaatgcatttttagaatgactgttttgtgaatagcatttgtttgttcctctaaggttggaaacgacattgatcacaaaaggttgaattttctcaggaaactttctgataattcactggctcttgcctcattgatcttgtttggatagaccaagtaggtatgaaagaattattcatgctcttaataagattgtgctatgatgtccagaagtgacttatatactttggcatcttcggtgtgatattacaggtgagcattacttgggttcatcaggattccccagtctcccaagatacctctgccatgcacacctgccaacacctgaggccttgggaagtgaatttttactgacttattagtgacttgctaataaacataatgagtcttagcaatgggctctcattaatcaaggggaacacgtggtctgactaaaatatgtaagagacactctccatactcgcatgaacagagttatgacagtcacgatatgtggactggccatgagatgtagggacactccccacccttgtgctactagggtttcggtctggcaaggccttgagactgcactcttaagaaaggcacttggggccgggtgtggtggctcacacctgtagtcccagcactttgggaggctgaagcaggtggatcacctgaggtcaggagttcgagaccagcctgaccaacatggagaactccatctctactaaaagtacaaaattagctgggcatggtggcacatgcctgtaatcccagctactcaggaggctgaggcaggagaatcacttgaacctgggaggcagaggttgcagtgagccaagatcatgccattgcactccagtctgggcaaaaagagcaaaactccatctcaaaaaaaattaattaattaattcaataaaaataaaaggcacttggttccttaattgctcttgtgaaagaccactggtgtagtaagatttctgattgtctgatgctgacaagaaggatcctgaaattctgactctattgtagcctctgccttcaatgagctttccatgcaaagtgttctcttagcacctaagacaccagagctgagacttcatggagcctacagagaaggttgtatggaccttgggggcctgcatcacaataaatgttaatatttaacaaatctctttctgtgtgaatttggtctaaagcattagcaagatggtaagggagtggccaaccctcacccaactcaaacttctgaagctcttttatctacccaagagaactgaagattttatcttacagaacttgagagttgtacaagatcaaattagtcaatgtgcaacccttaggaatgtatcttaaaacatttccttccttttccattagccacctgcagtggagctgccaccaaaatgcagatttttgtgaaaaccctcacagggaagaccatcaccctcaaggttgaaccctcagatacgatagaaaatataaaggccaagacccaggataaggaaagaattcctcctgatcagtaaagactgatctttgctagcaagcaactggaggatggatgtgctttgtctgactacaacattcaaaaggagtctactcttcatcttgtgttgagacttcgtggtggtgctaagaaaaggaagaagtcttacaccactcccaagaagaataagcacaagaggaagaagattaagctggctgtcctgaaatactataaggtagacgagaatggcaaaattagtcaccttcatcgagagtgcccttctgatgaatgtggtgctggagtgtttatggcaagccactatgacagacattattgtggcaaatgttgtctgacttactgcttcaacaaaccagaagacaaggaactgtatgagttaataaaagacatgaactaacaaacaaaacaaaacaaacaaacaaacaaaatcatttccttttgcgtttcctcctgcctcagcctcccaagtagctgggactacaggtgcacaccaccacgcccagctaatttttctatttttggtagaaacggggtctcaccatgttggtcaggctggtcttgaactcctgacctcaggtgatccacccaccgtggcctcccaaagtgctgggattacaggtgtgagccaccgtgcctggccaactttaaactttctagaagtagccactttaaataaaataaaaagaaacaggtgaaattaattttaataatatattttattttacccagtatacccaaaatattatcatgtcatcatgtaatcaataagttagtagtgagatatcttccattcttgttttcagatgaggtctttgaaactgctgtgtattttacactcataacacatctcaattcgaactccccacattgcaggtgctccacagccacatgcggctggtggctgccatactgcatggcacggctctatgggagcaattttcggcaacggaacatcttgttcctcctcagtgctcctccaggtttctgctgcagggtgaatccccaggtaaggaactctcgacagaagaaggaaggacaccagtgtccagagtcattcctcaccccggcccctggactctcctgcctactctctccaaggctcctcctgattcctggccctggcaccgggctcctgctgccaccagcaccactgcccactgggagaagcaagagctcctgggaaaaccactcccttcaacaaatctacacgtggtctgaagtttttgggggtttttgttttaaatcagaaataaaagaatgaaccaaattacaaaaagggacacatttttccagatccaggacactgaactgtccaaactacaagaatatgaaatctaactatgggacttagcttctgagctcattcatgtgtttaattaattagccattgacctttaacgagctctgccttcagggggttaccattctgagcccttaatgatgggtcctcacatcctgcgacccagggacagtgagggagggtctaatgaaaactcagctatagcgtttcttcttccagaaggcgtgcgctacccggcccggggcgatcagacccagactgatgcactcatgcaaatcaaggccttcctaccgcaggggaagtgggcaggccccttggagatcctggtgtctggtcttctgaaatacccagaagtatttcacaagcctgggaagccctttcataagagaaatggtggaaagggaagcctgaatctttccagcaacagaaaagggtggaggattcagaaaaaccctggttcatttgtaaaataccagccagacctcaggaaagacggaaaccaaggcagttccaggaatctaagtagcaggagtcaaggacctgtcctcagagtgacccagctctgaatcagttcatccctgcatccctccctcaggagagctgtgattggccagcatgggtcacatgaccaccatcttgcctgacagctggaccacacgatgtgaaggaaaatcacagtgttcccggacgcatcccactcccttcaaaggcagtggttccctgtggagtgattctcagccccggggatgggaccacaccctcagagaggcttggctaaatctgggccagaggtgcaggagtattgggtggatgttgttctatcttccctctgcccctcttaagactgctgaggatggggtggggcacagaattctcaatcactcttaacaaaatgcatccaagattgagccacaaagctgaatgactggaaacagggcttcaaggaccctttgtgttattatttataaggaatcaaacattacaaattttagaaatagaaggaaccctggggtcactggtcctcaaacttttgttaagccacatgtgccatcctttgaacaaagcagtccatggaagccactgtactgaagcaaagccaaggggccacaggcatctcccatgctcagctgccctcttccctcagagacccttcaagcaactcgatgcaacatgagggctctgccaaatgcaccttgaagtccagagcctccctccatgtatgcagggctgaggccagactgatgcagtgcatcattgaactcgtgaatggaagttagtggaagataacaggcctggaacctaccatgggcttctctctcctagccaagagctgagtgctaagccctgactccatccttcgaggtgcctgtcattcttccccacctccctcctaggattgtgtcaaaaccaccagcactgggtcccatcagttaaatctttataactgctcatagtgatagtaaaaggccagtcaatatgtattcttaaaatagggattaagcagatgtttctgcaagcacactgtcctgctttgaagataatcacccgataagctgaccccaaaacccccaaaggtgagtagggcccactggaatgtacagctgctgatacgctgaggaaaatttgttttggaagtgttttcttttgtttgcgccagaactcagaaatgtgtagacgcttgtgtttttattatgctgtggatgttgtcagctgaattttcaaaagcttcaccagcagaatcatctagatttttctgaattgagattatgggtcaatagtctaattttacaaaacattccaactctgataattgcctatgtcctagatctagaccagtggtcctcaaagtgtggtccctggatcacaacacctgggaacggatcagaaatgcaaatactccagcagatgccagacctactggcttagaatttctggggctggggcccaggagtctgggttttaacgtgcccccccaccccgcccacctttcaccccaggtaacactgatgcacactgaagttttagaaccactaatctagactatttacagccatgtttttagaaaggagctggagaaataactagaatttggagcattattgaaaatcagcccttttttaactcaaatggtggggattaaaaaggaaaaaaaacagccttgctgacctattcacagggatcccagaaactccatttaaaacccaactgctaaagaatgggtatttaagttcattaagagttctagttagctggaatttaattaaaaaacacttttccttcaactctggatgtcaaaaacctttccaaaaatgttatggctgttcttccaggtgctaatgttggcctggagggcactggacaaattctacatctctccaccctctctcttgcctctgcctcagtctcctcaactttgctgtctctccctttgcattcatcctgactcttcctccactcctcttgcctctccacccccagactcctcctcttccttcccagtttcctctccttctcttctccggaagttcatttccgggctcagaggaattcttggcatacaaaggcatagccctgaaggtagggcttcatgcctgcaccattttatcccctaaactccctggcctcttgctgctttccacaggcacgtttaagagacacatgaattacatgaaaaagtatatatgtcagcctttaaatatttttaaaattgtttttaagtgaaagcatttgactagaaaccacatcattttaaaattctgggaattttaaagagaaaaggagagggagattttaaagtctgctgcttacagtttcctcaagataagcaaatcaggcatcatagcagaccagtaacttcatacgtatatatttggtgaccatgagatctagaagttagcaaacccaaatattttaaagtcacctggaattcctactacatcaaaaggctgagaagttgaataactttggccataggttgtaggtaacgtgttgaggagtttacttcacttctaagtgcacagcaaagagtggcctactataatttatctggctgataaaactacaggagctctttccgtaggcttgattacacgggcagcatgaagaaatgcatggtggttttgtgaaggcaggggccatcagtcctttcacatacactgcaatatcctccaagtaggatgcaaagactggatcagtgatgtcccacggccacacccagggatgaatcccttccacaagtcagaccaaaggaaatggccactgagactgagctaaaacctcgttgatctgatgtaagaaaatacccaaaacctgcaggccaaaatcactcacacgaccagctgatgcgatgtgaattttagcctctttcatgtcatctgatgatctcagcagagaacaaaaaggtccagtgttcacctggccctgcccttgagggactatttgggttctccagaagtggaccccaaggcaaagactgggtacctgtggcttatctgggaggtgatcccaggaagcacaggtaagggaggctagtgagccagagaaggaaacaaaaccaatgaaggaatgtgacgagcaggttgccattgtagacagctcagtacggctggggtccctctgagggaccatgtggaatgtggctctgaaccatcactatgaggggtggggaacttatccacctatcccagtccacagcaactgagggttgttcctggggtgttaacacccagcgcttctggactatactgatgtgggccatgcatgttcccagagcccgagatgcaggcagtgatcagggtgttcagcgtgtctgagtgaccactggcatggcccaaggtgtgtggacaggacaccaacatcaaggtccatggggccacctatagccgagaactctctggcttcgtgtctggcctctgagtaataccggttccctgactattctttggaggtagagaatgaaccacaaatacaaaagaccccaactcctgtctacacttaccacggctgagctgcgaggctctgaagtcatttaacctcatcaagggtgagtttcctcactggcccagagaaggatttggaataggtcatttctgagaataaaacctgcccccccaataaccacgggctgttctgaggctcccacaggcttgcacaaggccctccccagcgtcctgcatctgcctgctgtgtttatgatttctactattatccaaggaccacctgcatcttattcactctgtatttgtctttaaaggtactcattcttacgtaggtttatttggaaaggaatattttatgtcatccgctgtaaataacaggtaatcataaaaaattcacaactattaaatatcactcctccatgcactttctaaagtcacctcccatttcaacagggttctgcacccacactgtggagaaaaccaagctggtgtctgtcacatcaagtgctctgtagtaataacagtgatcagggattcagcaccaccaggtgatgggcaagtcatatacattattacatcatttagttctcactaggcactttcactcctatggtgggtggggagtattgtgattccatttcacagatgaaaaaaccgaggctcagagggacaaggcaattggcccacagtctcacagatgctcagctgtagcaggaggttcctagtcacaggctacactcctcgctggggctctgcagctcacctgcgggcagtactgtcttacttggacccaggggccagtcatgctaattgcctgtgctggtctcacccacattcttggtagcatctttccccagaaccttcataatattcttacagggctgatacttcaaatgtccacactctatgtcacaatatacatgaaggtgtattatgcgatgccttttccttatttttcgttatctatgttgccttattttttctactgagaatatggattgcttttgtaaaaagagaaaaacaacagaaagtttaagcttgttttttaaattcactgtcattttccatcaagggtaaaagaggaaccccattctttctcccctttatttgaagagtacccaggatggcactgcgtgagtgacaagtgaggacagatgctcacaaagcaacatgtggaagtgttggggagagggcctcggagggcctgaggggtgctgtgaagggtgctgggtccccgtgtctgaaggccatgttctggcagtctgaggttgcacaaaacagaagaatggggatgagctacaggtgtcagcagaatagcagagtgatgtcagacactaataaggcccaactcccagctcagatgtccaacaggctcgaggccatcgttttccaagccaactattgagcgtgtgtcctcagggccttcctgaagtgcattctcactgccatctctgtgtttctatctagggtgcccaagtgtcctactagctgtcctgagagtcccagcctgcattgactgacctgtgttattacaaactgcaccctcttttgcacactgtcctggtttgaacatatcatacgtgctcacgcgcagaggggcaggtaacatagacaaagcaaaattgggtttcccctagattctagttctgattttcccctcaaccagcagagtaatcctagacagcaaaggctggacaaagtgaagggatggcaaacatccggcgctaaccctgactgtccaaagaggctgcttggagttccatgtggcaaagaagcctaaagcatacctgggcatggcagggaagagtctgcggttttgtcagcaattttgatgagttgtaggcatggaaggggcggggaagggcagcccatgtgccctaatcaagcagcctttccactaaatagtctccatgggtcgttctgctctgacattggagctcaaaaacgatcagaaaagggccatgcttaaagctatgtgccatccctggttctgtacaaccctggtggtccagaatcattctgctttttggtggtgggattctcccagcaaaagcagaaaatccaatcagttagttagaatcatgatgaagaatcccaagaaggaaatcaccactgttctgtaaagagcaactccacataaccctgcaggaaagtcaagtggctaagaacccctggcatctcccctggggctattggtcacgctataagagggaactctagaggaaatagaaatttcttcctctgttatcttgagacttctgtggagccgcaatctcaaaactcttagccaataggacagaggtatcactgtgtccaaataaccactgcccaaagcaaggtccttcctaaatttggtgttgggcatcagtatgtctgacaagtaaaacagcagcttgtcactgtaacgccggcaggttttgctagcctagcataaccaacaagcttcatagtctgtgtttctctcgtgagagaggggtgtgtgtatgggtgtgtgagttcactcataaagactcaattgaaattaacaagtcaagagacagagtgactgcaaaagaagtagtgaccgccaaagtaacacaaagaggaagcctgtaaaacctgcacttccaccattccattcaacactgtaattaagctacgtaaacccaaggatgtgttccgctcaccttgttaagccgttcaagcatttcttttagcaggagttgacattcgcactcattttcatacctgcaaattggacacataagtgagagttgggtaactaccatgctttcacatgtatggatcacataatcagcattaaattcaacctgggtacgatgccctctcctttaaggagagggtcttaattttaaagtagtagctaacgaatgctgcatttcctagctgactgcctcccaatcagaaagtggtaccatttgcacaccgcgtggggtaaccaggggcagttagcggaataggagtctcccagcccgaaggcaccaaccccagcccctacagccttattcccagccaccccaaggatgagggaattatatcctagcctatctataacccaagtgcagcagtggcagagatgggagactgccctgcacaatctacaccaccattaacctgaccgtacttggatttcctatagtattttatttgctgacacatgtaatttgtcagtttttctggattatgtcatttaatccttacatcaccccagaagaaagcagttattgttagtgctgcattaaagatgaggaaactcaggcagatgctccgcacacttttccctcctcccagcagcatcactccccacacagcgatggcctcctctgggcaaatgggtggggcaggctggacgtgccagggagtcagggcctctgggagcagcccacaaactctgaatgaggcaaattggagcataagtaccccagctccttttctgctcggctgggacaactgaggcacgtccctctgggggaattttaaccctaaagagagaagattccttcctaaatgacccctccccttgttccctataaggtgacccccaaatgcccattcttgctgtcttcaggagttagagcccttgatgcttggcaagcacaggactgcctagaagggagactacattttccagcattccttgcagccaggtgtggccatgtgactaagtcctgaccaatgggatggaagcataagtctgcatggcagcttccagatacctttagttaagtaatggtgtatgtgtgccctttgcttctcattttccatccctccctccatcctgcagccagaaacatgaatgctgccttcctgaaggccacacagaaccttctgtgtcccaaatactgtacagtatcatactaaactgcttaaccagaccttacacaagtgagaaacattttggataagccaatgacattttgggtaagccagtatcactttttctgtttttttctgtatggcgggggggggggggggggggctggtaaaatatgcataacataaaatttaccaacttaaccattttaagtatatagtttgtgatagtaaatatattcataatgttgtgaaatcaccaccaacatccatctctgtaactcctcatcttgcaaagcagaaactccgtacccattaaatactaactccccattctccccatccccagccctgacaaccaccattgtactttctgtctctatgaatttgacacgcccaactaccttatgtaagtggaatcatacaatatttttctttctgtgactggcttgtttcacttagcataatgtcttcaagtttcaaccatattgtagcatatgtcagaattaccttcctttttaagggtgtataatattctatgtatcgaccacattttgtttacgtattcctttgtcagtggacacttgggttgcttctacattttagctattgtgaacagtgctgttatgaacacgtatatgcaagtagctattcaaaaccctctttcaattcttttgggtatatgcacagaaatggaaatgttgcatcatatggtaactctattttttaattttttgaggaactgccatactgttttccacaatggctgtaccattttacagtcccatcaacagtccataatttctccacatcctaacaaacacttattttctgttgttttttgttttgttttgttttttatagttgccatcctaattggtctgaagtgggtcaatgtcagtttggagtttctgtcctttatagttgaaagcaatcctaattaacactgagcccaatccacaaagcatagttttctgtgcccttgcatgcccatgccatgggttcaagtcaagtattctgcaaccatgaaaggtgctagaaaaccacaccaccatgttctcagaaggaaaagtcatgaactgaaggaagaacaattatgaatatgtgcaatgtgcacgcattcccagatctaaaaccatctgcgaagctgagttctatctaggaaactaaacatctctgcataagttttacatttcacatcaggatgttacatttagtagtttattttgtgtgttgcaataacagagccagaaattagtttttaaatgtataattagctttgagaataaaacttaataaaatctaattttcttattgctctttcctgctggaaatatctaagagtttccatagcttaagaacatgtttgaggatcaacacattaacctgatattgtgagtaattttcatgctgtaaagacaagtctagatattatattaaagagaagtgatttccgggcgcggtggctcacgcctgtaatcccagcactttaggaggccgaggcgggcagatcacgaggtcaggagatcgagaccatcctggctaacacggtgaaaccctgtctctactaaaaatacaaaaaaattagcagggtgtggtagtgggcgcctgtagtcccagctacttaggaggctgaggcaggagaatagcgtgaacccaggaggcagagcttgcagtgagccgagatcacgccactgcactccaggctgggtgacagagcgagactctgtatcaaaaaaaataataaaataaaataagagagagagagagagtgatttcactacaaagaattcatgatgtgtatattcatataagtatattcataaagtgaaaaaactggcttcaattaactgttttacataaattatttttagttttcaacaatttgaataattgactctgttgttgtattttgatagttttgtttttatttcattcttgttttattcagtgttttgtttagtctttgacctgttaaagacctgattttgaaattattcaactgccaggtagagactatgcctagcactggcatggaaccaagcctgcacatactaacccattgctgcattattttcccctggctttaggtagccatcaactcacctctggaatgtaaactccagcctggcatgtatgtgtatgtgtgtgtgcctatggatgtggatgagcatttctataatgattttcagttcccactaccacaatccaaatgtcaaaacttctccaagggggcaaagggagggaataaattaatatgaattttaaataaatcacagagcctgatggaactgcttcatgatgggcatataactcagaaccaagtgcaatcagtaaagaccaggaaaacccaacatggcctttccttcaactaggactcatggatgtcatgcttaccagccaaagtacagtagactatggtctaatgccaacacaaaggccatccagggaatcttgatggtccatcaagctgccccggatgtctgagccacagggcactttccccctttgctttggagaacatgagcttcatctgaatgaggtcctatttctgggccttaggctgcaggagtccaagaacggattatctcaagatacagtgttcccgaaagagcataggcccagggtgagaaaacccaggttcaagttctgccacccacaggccctctcccaggctcagtttccccatgaagttctgtaacaagtggattttcaggtcccttctaccagctccaagtctgtttctacagattaaaccccaagacaaaagagctgacaggaatcgaatcaataaatgtgatttgataaatgtgttcagaacacaacaatgaataacctgcccaagattcagattgagaaactggaactcaaacatagagcaggtttacagaaatcctctgactaccctatgccaagggttcccaaatctggctggaatgaccagtggcactcattaaaaatgtttaagcttctgggcccctcttgaggtccagggtagagcctagacatctgtattttaaaattcatttatgtaattttaaatggatgaatatcttacatggttaaataagtgtgtgtgtgtgtgtgtgtgtgtgtgagacagagtctcactctgtcacccaggctggagtgcagtggcgcaatctcagctcactgcagcctccgcctcccagattcaagtgattctcctgcctcagcctcccgggtagctggaactacaggcgtgtgccactacacccagctaatttttgtattttttaaagtagacacagggtttcacaatgttggccaggctggtctggaactcctgacctcaagtgttctgcctgccttggcctcccaaagtgctgggattacaggcgtgagccactgcacccagcccatagttaaataatttttttaaagatataaaaagatgttctgttaaaagtctccttcccacctctgtctcccaattgctcagttcctactcacttatctccctcaggtagccagtgtcattggggcatgtgcctgtgtgtgtgtctgtgtgtgtgtgtctttgtgtgtgtcctgaaattctttttatgcaagcaaaaaaaaaactctactctcctccccttttaaaagactacatgacaataacatacttttttccactgcatagtattccattacatggaggaagcacctgtctccttttaatgggcatttatttggttccaggcttattgcagatcctgctgcagtgagtatctttgcaggcatgccattgcacacctgctggagtgtacctgttgcagtgagtatctttgcagccatgccattgcacacctgctggagtgtacctgctgcagtattggtggaggcatgccattgcacacctgctggagtgcatcctataatacattcctcaaagtagccttctgagtcaaagagcacacacatttataacttgaaaaaatgttgacaaattgcatcttttttttaacagctcctatgtgattttaacacattactcaatctgtgggaggggagaccatgccctggaccagtgctgcttagtcaacatttaactttttaaactgaaaatcacctggggagcttgttaaaatgcagattctgattctggagttctagggtgggcccaagaatctgtatttctagcaaactcccgggtgatgccaatactgctggtccatggaccgcactttgagtatcaagacactagaggacacatactgagcataattcccaggtgtcagctgctatgccatgaaggcaattagacttagcatgcccaggacctaaattccagtcccgggacagcagttcgccagctgaggggccttgctggccaaatccctacattttctgagcctcagtcgcctcatctgtaaaacaggtgcagtaaagataagtatgtaaggattaaataacatcggtacatctcaaaaccaatgtgctgagcaaaagaagccagacaatagagtacatcccgtaagattctatttttgtggaactgtagaataggcaaagtcaatctatggtgatagaaatcagaatgggtgcctccggtctggggcaaaggggactgactgggaaaggggaggagggaactttcaggggtagtggaaatatctcacttgttttcgtggtaacacgggtatatacatttgtcaaaactcactgaactatgcacttcaaatctgtgcattttataacatgtaagttataccaaaatttaaaaatagatgaaaagtaaatgatacaacttcgtgtaaactgtgacgtgccatcaaaacagaagccagtcttagcttaaggaaatgtgccacctgcgtgcagggatgaggtcatcgatcgacaggggaccagagacggcgctccacccctgcatggtagcagcgtgctcccagccccgcgccgccgggacggcccacgccctgcctcggtttcccccgatggccgccgcttacttgcttcggaactcgtcgagcgcgcgctgcgcctcggtgccctggcgctccagccgggcgcgctcggcctccaggtcccggacgcgctggcggttgctctcgacttggcgggcgagggcgtcctcgggcccggccagctcgcccaggcgctggaaggcatccagctgcctccggagcccggcatggcgctgctcgagggcgcgggcccgctggacgtgggcggccacgcgctcgccgagcccctgcagcgccgccaggctcgttgccccagcccagccctcgtcggccgggcgctcgggctcggcggcgcgcgaagcctcgtcggcgtgctcgtactgctccttgcgggtctggaagacgtagctgcgccggtacatggctgctctggcgcgggcgcgcgggcggcgccgagccggctctccaggaggcccccggcgcagcccgcagcccgctaaataaacaccggaggcccccggcgcgctgctgggacgttccagagccgatcagcagttgggcgccacgctgggcccgggcgcgggagaagaaaagagcagcggcccgctttgtgcggcggattagcggcccatacagctccggggttggaaggttacgctgggcaatgaggtttttgttccgtgattgttcaggcctgttgcttttgattgaatggagggtcaggggacacgggagccatgacgctcttttcactggttccactggggactgtgaaggaatccccaagcgaactctttaaacttggactagctcaagagcccagggcttgtcactttgtctcctcttgcattcaaactcaattgtagaactctttaacaatgccattttttttttctgattacttaagcaattcttttttttttcttttggtcttttttatttccaattgctcggttatgcatgcaattctttttcataatcataacatgacgtttaggacccttctgtatagcagaggttcttaaccatggatgcaaaataaaatggcatgtctccattaagtagtgaggtgtggcgcaagtaatttcttagtaatacccgtgcataaaagcctacaataacttaggagacatgcacggttatgtttttataattcacccatgctctgatggagtttgacatgctttcttgaatggaaaaaacaaatagagccccacccatgggcctgtaataggtggttcacgcctgtaatcctagcactttgggaggccgaggcgggcggatcacctgagttcgaggccagcctggccaacatggtgaaactccgtctctactaaaaataccaaaattagccaggcgtggtggcgtgtgccagtaatcccagctacctgggaggctgaggcaggagaatcgctggaacctgggaggcggaggctgcagtgagccgagatcgccccactgcactccagcctgggtaacagagtgagactccgtctcaaaaaaaaaaaaaaaaagaaaaagaaaaaaagattgcttttttctttttctttttttaacataaaatgtaatacaaaaaaattttaataaaaaatgagatggggtcttgctatgttgcccaggcaggactcaaactcctgggctcaagtgatccgccattaattggccaaccctcaattcgagaataataaaggattttgtgccattatgttccattttaatttttattatggaactaatagttggattttaaggacaagcttttaaaatatatatatataattaatagctagactttgacaaatttaaaagtaaatttaagaaaagaaattaataccacttgatgagaatgtttctgaatgtaaatattttgtcatatctccaactttaaaaataagtatcaaaagggttgttttcttaaaaggattagtagtaccatataattactaactatatggattgtgtgtgattatactacaaattaaagtcatagttatcaaagatagagaaagaaaattacacagatctttgtggagtttattattacaccaaaatattacctcaagataatagattccgtctggaataaagctctgcaaggccctaaactgtgctggtggcatggttattgttctattttcttaaaccatttaaaattagatttggccaggtgcagtggaccacacctctaatccagaactttgggaggccaaagtgggaggatctcttgaggccaggagttcaagacgagccttggcaacatagtgagacccccatttcttttatttataaaaataaaaataataaataaaaatacataaaatgtaattgtatggtcaaattgaggataaccacatgaatatttttgtaggtgcacatataccatgctgatagcatggtaaattgacttcaggcttcctcacgagagcaaaaccaacatatagcaagagttataaaatcatttgttccctatgataccatgtatcagtcaaatattgctacagaacaaaatagaagtatttatcactgcattccctggggctgggagctcagctgtcttccagctgtaggtctcctttcagcaggggctgctctgctcccaatgtccctcaagcttctaaactagcaatgaaaaaagcacaagagcaagcccagccacacaagctcatcccaggcctttgtttgcatcatgtctgctgacatctcattggtcaaagcaaatcacatggccacaaataaagtcaagaggaagcaaggaggaggcagggctcagcctgaggccctggcaagggtgtgggtggataatcccatcatgctggagtggagaatcaggacccacaactcaatcgaccacacatggcaataccatttgagaaaaatatattctagaaacataacaaaaaattctttcaatttaatccagtgaaataaacactcagaaaatatctcctcacaaagcgtagcctcagagttaaatattgcacaaaatcaagtctctgccctcagggtgcaggaggcgaatccatactgactaatgaaaacacaagataatctggacaacttctaaaataaagatcttagcaaaatgctgtggttgtattgtctaacttcaggtgcactgggaaatgcaatcctgctatgtgcttagaaggagtgtgcaatatttgtcaacagccctaaagaccatatcactgataggagaccattcagtaggagtagagatcgtatgcataaggaagaaatcattgctgaatgaatttgttaattcaagagacatgttcgtagagatagattccacaggacttgatgaaaggtcagctatggaagagttactctaaatacagttgaatggcactagtttgggggcagggacaggaaatggatgttttagaataagaaagatctgaggttaagttctggtcccatcacttcagtaagtgatttaacctatctagtcccagtatggagactggtaaaatgagaataatcacttatgtaagtagggtaaccacacatcccagtttgcctaagacacatttacacccactatctcagcgtaaatatagcaagcaccatctttcactctcaagggtatcttggtttgtctgagaaatacacgtcttttatctggcctgcataacctgaatatgtagcctatatctgaccataaggaatcatccagataaatcccaaagaaggaacatcctattaataaaaacagaagggggatggtattctataaaaatgttaatatcataaaagacaaagagaagctatgaaaatgttccagattaaaggagactgaagagacaggacatctaaatgcagtatagggccgagtgtggtggctcatgcctgtaatcctagcactttggaggctgaggtgggtggatcatctgaggtcaggagttcgagaccagcctggccaacatggtgaaaccccatctctactaataatacaaaaaattagccggacgtcgtggcttgtgcctgtagtcccagctactcgggaggctgagacatgagaattccttgaatccggaggggtagaggttgcagtgagccaatatcacgccactgcactccaacctaggtgacagagtgagactccatctcaaaaataaaaataaataaataaatgcaatatggatcctagactggatcttgtattggaggagaaaaactgctataaaggttatcactaggttcattaacaaaattagaatataaatagtagattagaacataaaattgtatcaagattaaatttactgaagtttatgactatgctacagctatgtaaaataatatcattattcttagaaaatacactctgagggctcaggctgggcacggtggctcacgcctgtaatcccagcactttgggagaccaaggtgggcggatcatgaggtcaggagttcaagaccatcctagccaacatggtgaaaccccatctgtactaaaaatacaaaaaaattagcaaggcatggtgctacacacctgtagtcccagctacttgggaggctgaggcaggagaatcacttgaacccaggaggcagaggttgcagtgagtcgagataatgccaatgcactccagcctggcaacagagcgagacttcatctcaaaaaaaggaaaatatactctgaactatctaggagcaaagacccatgatgtatgcaacttattctcaaatgattctgaataaaatgacatgtataaatataaacataaataagtatgagagatagtaaggaaattagacaaaatattaagaggtgaatctgggttgtttgtactattcttgccatttttcctagaaagtttgaaattattttccaaaacacctgcaaaaagtgtgatcacctttgcagtatagacatttaataaatattacttgctttatgttatagctatatatatgtataatggctaagagagggagaggtgcagagaggagaatggcttagcaaactgcagtaacaataggagaaaatgggctataaccattgaacaattttacttatttattttatttatgtatttatttttttaaaaaaacagggtcttgctatgttacccacactggtctcgaactccctgccctcaagcaatcctcctgcctcagcctcccaaagtgctgggatcacaggtaagagttagcacacctggccccaccaaacaattttaaccttgtggaatatactatgatataaataaaaatgcttataacaaacttgaaggggaaaagaaaagcaaaataccagatgcatggtaattttagcagtacaaaaatatcagaaattagtgaaatatgccaggtttaatgttcatcatatcttttattccatttaaagttgtttaaggctgggtgaagtggctcatacctacaatcccagcactttgggaggccaaggcgggtggactgcttgagcccggaagttcaagaccagcctgggcaacatcgtgaaaccccatgtcgacaaaaaatataggcacatgcctgtagtctcagatactcaggaggctgaggtaggaggattgctggagcctgggaggcagagactgcagtgagctgagattgcaccactgcactccagtctaggtgatagaatgagaccctgtctcaaaaaataaataaaataaagttatttaaatgtaaaatacagtttcaaaattttttaattaacatttttcttcactaacaaatatctaaaagcctgagtaaaataggcttagatgttttgccttttagtcaatttcatactctagcattttgagccatccctttcagttgagatacattctgagtttgctttggacattttacagaaacaaaaggtaatggaggtaatcatatattccttagaggtgggtttcacgttaggtctctgctgcctactattgtgtgaccttgaacaggtcaatctgttttctacaatgatggacttaagctaaagaatatctaaggttcctttctgcttattatgagcagaattgtattcctccaaatctcacatgttgaagtcctaactccctcaaaatgtggctgccttcagagatggggcctgtaaagaggtaattgaggctgttagggtggacccgtctgtggtgctttgttctggaagccctagcaaacgaatacactgctctaacactctgactctgcaccttttaccatccgtcctttacccagaacatgcaaatgtctgccacaagagggccaccctatactaaaattgaatgccctgccacatggtcccaccagggtgcagcttgaagcctttccaccaaactggaccaactcaaaaggtaagtcagccatggaaagtgacagcccaggagtaaaagggcaggcagacccctggctcccggatccctactatccctgctccctgtagccaggcctctccatgaggccccagtctctaaagacgcacccgtgaagtatgctcagtgctcctggaagtgatgagtctgtaggaagggtcacagcagatggagaaacacactcagaagcaaggctctctctccaactaactgcacacacgcagttgactctgaagagttgctggaaaatgaagcctgagattcaaacactatcaaagagagcactaagcatccaacctgcttttctcagggtctaattcagaaactgaagcaccaaaaaaaaaaaaaaaaaaaaacaaatttgtgtgacagcaagtgtgtgcctggtgctttgactgacaggcaccgacaaaaggcaggattaccaaatgtaatgcaggatcctaaactggaccctagactgcaaaaataaaatctataagggacattgtgatgacaattgatgaaatttgaatatggaatgaggattgataaaaatattgtaacagagttaaaatgtctaattttaaacattgtattacgacatgtaagaaaatgaccttggctgggtgctgtggctcacccctgtaatcccagcactttgggaggtcgaggcaggagggttacttgagcccaggaatccaagaccagcctgggcaatataatgagaccctgtctctacccccaaaaatacaaaaattggccgggcatggtggcacatgtctgtagttccagctacttgggaggctgagatgagaggatcacttgagcctgggaggcagaggttgccgtgagccaagactgtgccactgcactccagcctgggtgacagaaggacactgtgtctcaaaagaaaaaaaaaagaaagagagaaaggaaaggaaaggaaaggaggaaggaagaaagggaagggaaggaaggaaagaaaatgacctcgttcataggaaactggtttggggatgaggcatgatgtccaacttactctcaatggttcaaaaaataaataatagatatgcatttatgttgatataaacatatataaataaatacataaaataataaagcaaatgattggtggatttaggtaagaggtatagaagttccttttactcctcctgcaacttttccataagtttgaaattgtaacaaaagaaaaagttacctctcaaaatcccaacacctccaggaaaattgtgctgagaacaggtgtttcttaatgatagcaagaaaacgcaaaaatcttcctttgattcaccagatggtatcatgatctcagcaaccaggatttcattgacaaccacggtaggagttttacacctaccgaaatgatggtacggattttcagagacatctggacttgccttctctgcacagtctcagaatgtccttgagacattgtcgtaccaactcatcgtcattctggttatgcatgaaaagcagcccttcccatgacctcagaaatgcagaaatgagtcattgtcccagcaggtgccatcctcaggactgcgtttggagaagtgtcttttacagttataatttctgtggctataaatctagccatggtattcatatttctgccctatatttctctctaagatatcattaaacaaacctaccaccactttcaagttgggtcagcctacatctgaaccacagcccgtttccttctgggaatacactgtcaagtggtttgatatattaccaagccacagttgtccaactggcatgcccactctgtcctaaaaagaaggatgttccagccctgctttgtatcagttaggagatagatcccaaggaattgggcacatgcatccatgaatatatttcttcttcttttttttttttttttttttttttttgcaatggggtcttgctcagcccaggctgaagtgcagtggtacaatctcagctcactgcagcctcaacctcctgggctcaagcgactcacccacctcagctgccaaactagctgggactacaggtgcacactaccatgcccagctaatttttaaactgtttcatacacacaggagtcttgctgtgctgctcaggtggtctcgaattcctggcctcaagtgatcctcctgactcagcctccccaggtattgggattacacgtgtgagccaccatgcccagcccatgaatatatttctgatagaaatatacattcatatattcatagattgaacatacatttgggggctgggcatctggctctcgcccagcactttgggaggctgaggcaggtggattgattgagcacaggaatttgaaaccagcctgggcaacatggcaaaaccctgtcgctatatataaaaaataataataataatacaaaaaattagctgagcatggtggtgtgtacctctgtagtcctagctactcgggaggctgaggtgggaggatagactgagcctggcaggtcaaggctgcagtgagccatgattgtgtcgctgcactccagcatgggccacagagcaaaactctatctcaaaaaaaaagacaaaaattaaaaaaagaaacatacatttgggctgtccattgttttgtaggtccaggtctacttttctattaatatcagtagggactgattgaacacaagagaacatgttctatcttccaaagttcactagcttcccagcgttgacctgaaattgggggggacaacaatagtgcaagctattttatgaactattttcatattgtgcatacagtttaggagtatagtaaggtacagtttaggagtatactatacattttaagcccctcaacggcccctcagacctaaactccacatgaagttttctaatgaaattctaaaaatagtcagtttacagaagttcgccattgtttagcagggtctggccaaaattcaaagaatgacctattccaaccatctgacttgttagttcatttggtaaggagctacaagtgatgtgaatatttcctgctattccaccctctaccacctgcctgctcatgatcaactcctactgacttctatgccttcatttatttgaaatttatgtcatcaggctttacttctcacccagcatacatcatccttttctccatttgcctgtcaccctcagctttgacaccaatatcttccctactcctttacacctcccacccaacccctcatgtatattaatgtatgcaggaagatgtctaaagtggtcttcagttctacacacccacgcccccataccccaagacaccattccagttaaggtcccccgctgtttacctggcagacctgctgtatgagtatcttcactagactgcagctctttgagggcagggctgatagcaatgctgggcatccctcagtggccattgtccacctgaggatctccccaggtgcccaccctccatccttctccatgcctctctaaaacgctgaaagcctggccctcccagactgcatcacctccgggtgcctctcatgtcctctagcttcctgtagggtttggcaaatgggagtcactgtcaggagatcaaaaagactcccttcctgcttcccttctgctctggcataatctctcctccaagatcctttcctcctgctcctttaaagcctacaggtagtaatagtttcccactgttgctactacaccatgggcacttcaccatgctttgttgattcatttggctcgttagatactaggaacgctgggagctacaaaatctcattcagcaactagttaaagcttctgacacaaagtggatgcccaataaaatgaattaaagagtgagtgaatattagagccaggagctgtagcatgcacctgtaatcccagctacttgagaggctgaggcgggaggatcactggagaccgggagttcaaggctgcagtgagcaatgatcattcctgtgaatagccactgcaccccattctgggcaacatagtgagaccctgtctctaaaaaaaaaataataattagtgaatattagatagaaacttgaaataaaagataaagtttttgcatgttgggaggtttgtcatgaaactcttaaatgggaaagctgaatagtgcttggccaaagatggatcattacaagggatcttaccagcagttccaggccctctcattccacattcgctgattgggctgtttcaaggggcatggtcaaatttagtagcagtccaaaattgaaatttactttgctgtctgctatgatggctaggtttacattgtctgtcatcattagaggaaatatatagggacagaacaaaaatacatttattaagaaagagaacagtgcaccagtcagcagaaagactatagttataagacacatgaaaagaaaaagttaattccttggaaaagagctttctattttaagaagatgaacaaaataagagaggtccttaagtgatagctaatgaagacacttcccaggcatcctcaatggctgtggcttttcagatgtcaaccgaaaacaaaatccattacaaagcgtagcatccaagttggatatgggttgcttattttgttctgtggtcagcctttgctgaacatagcagtctaaaccagagccacagagctgtgagtggtccttgtctgtaaaatgcacttggactgtcctcggtgaccctaattgcatgacttggcaagaacaacaattaaataggatattttggaccaaattctctcagagtacattattttctcaaggtaacctgagttttggggtgacacacacagtgtaaccaaaagtgccactttgcgagggtttgctaactgatgtcctcgtaacctccaaaatcaatttcagggcattgcagagtcaacacatcaatgttcccctgcctgcatttggggcacttgctggctgagtcacctgcaggagtgttctggagttgcctcttagtagatcatgagagccaattgctaaattttcaggaattttgcaagctggttgacacctcatcggtagcttgaaattggaaacggtgagagtatctacaccacaagaatgataaacactacaaaggaagacatttctctcctagaaagtcagctgttggccaagcattgtggctcatgcctgtaatccctgcactttaggaggccgagataggaggactgcttgagcccaggaattcaagaccagcctaggcaacatacagagacctcatctctaccaaaaaaaaaaaaaaaaaaaaaattcaccaggtgtggtgccatgcacctgtagtctctgctactcaggaggctgaggtgggaggatcactagagcccaagaggtcagggctgcagtaagctatgatcgcaccattgcatgcctgctctggtgacaaagtgagaccccatcttaaaaagaaaaaaaaaagtcagttgttaaacatttactaacctcacattacctatgaataataccatatctctggtgatggaaattttggcattctttcctcagtctcattaagctcaaagagagtcttcctaagtgtattgtttaacatggaaccctaaatttaaatgctaagttttaaaaaattagactagaattagagtatatagcctgagaacatggtttgttttcatttctagttggctcaagatgtttctgaaaaataatttataataaattgccttataaagttaaaatgccttccaaaattttataagtcaatttcaaaaactagggaagtcagccagtaaataaagagagaaagagatttatctcaaaatagtttcagcaccgctagaggaatctgtctctgtttcagtggaaaaggaggcagttactcctagctaatctcaatattttctttcccctggaataatggctgaccactggctctgttgtttttggccaactcctctactgaaacaaaaattttgtaactgcagtgacctaacttgggaaacaattttataacattttctaggaaccacaaatcatttgtttcattctttctgaagaccaacagtggcggtaagcagagagtgtcttttgccgtgtaacaaagaaaaaacttgataaagtcagcagccagaagagcatttcagttcaaagaagggtcatccagagcccatgaaatgttgtctttcacattaggaatgaatatgcctcacacagcgtcatgaccgactaaaaccctggatcaatccaacttgttattagagcataaatggtgacctttatttatcacacaatgaattttaagctgggaagccagttttaagaaaaacagcagcaacagtgttagctgcaaaaacattttagaagagctaggagaaaataaaacattattgaacttcttcatgtggctagaaaaaaaaaaccttctggcatgtgactcagatttccattgggtgaatgcagactcatccaagttatgcaacattattactgttgataggttacaaaaaatctatcagctcatctatcagaaaaatccaccagcaaaatgccctcaaaagcttatgaaatatgtaccagtgaagatatgcgaagcaacttgatatgctgttgtaggacatgtggtcatgaaaactatgtccgcttaagttaaatagtctggatttaaatccttcatgacccattagctacatgacttacacaagacactgaacctctctaagcctcacatgcttcatgtataaactggacgtgatagaagttcccaaaagagttgttgtgagacttaaatgttgtctggcatatggtaagtgcttaacaaatatctgcctttattttttgcacatggtctatgtttattttaagcatccgtcttagcttgaagtcccccagaagccaactccgtggcaaggatttgagtacaagtaatgtattttggacatgatcccaggacaccagtagaagagtggggaagtgagatggggaagggaaagtagccaatgatggcagggtgaccaccatcaccatgggggcaactggatctcaacatatctaagggttctaggagacagagtagaatgcatcacagagatatcccaggcaagggacgcgaagctgggtacttatccaccaatcccctatccatcattggttgagggctgctccctacacagccccaactcccaattgtgcagcacttgtgggacagaaagtggcagatggtttagagtaagcaggctttagcacatagaggtgagtgctgagggggtacgggggtgcagcacagccactgctacagccccacattattgttttcaggtaatcaaattagctgaagtacctctacatagttattttaatagatcagctctctagagataataatgtaacaaaacaaaagagctgtgtctatgctggttttaatggcagtactaagacaagaaataaattacctaacttaaaaaaatcagtatgagagttcccattaaatcaacacagagttgggaataatatatggagttaaaaccataattctgttttgaacctcttaccacctcctgaatatccatcacctaaaattacagatgtatctgttatttttcacagtgctgtggaatagccaagacatcatgaaaacgtaaaacatccctctttttccaaaaatcatcaagcttttagcagctgtaataataggcttccccagtaactgaaaccaatcaagtttttaggacaaataacattttaagactttcccatgcatccagacaaaggttcaaacactaaaatgatcattaacacctacaaactgcattcccaagctgagaaatgtatctgttacataatctgatcatttgtgttcttgtcatgtgaaaaggggaaagtcaatattttactaacctctcattcttgggctctcaatgcaatagaaattgacatgaggacaaaagagttttcccaggcgaggcttcaatggagcttatgcccaggcaaaagggaggtagcacaagagaaaaagagaattgcctgactgactttccaaaaagagcaggtagggcttttttttattaggcaaagcatgagcattgacactgggggtagggtttgcgggctgggctggacgaagcacaggagaggtagggtatgcaggtggcataactggttgtgatggttatcttgagtaatgggccatctgatggtctggccagcatcaacaaggctgtaaattaattgttcagcattccttccttggtttgatatttagatttcctaaggccagttcctggaattctttaagtaaaaggcatggttaaacattatgaaggagggggccgggcacggtggcttatgcctgtaatcccaacactttgaaaggccaaggtgttagagaagcaggagcctaagacagccagagtgaaaacattttaaaatcaactccatcttaaaactagtgaggcacactcttttccagtcacaacccatggtcctaaggtgtttacaacctaggaggcagcttggtaatgcctgcaagggcaaactcctacaacaacagaaaacctagatgtcccaataccaataacaagatatgctttcaagatcattatacttatgctttgatgtacttgcacactaaaatgccaaagatagttttctttaaatcaacagaataatacattttgtcatgctgtcggcccacctgcacattggcacagcttagtttagtctttacatagacaagaccccatatgagaaaaacttgaaacaaaaatggtgtgttcctcctcttgctttctgaaaatgtgctactctgtgacagagtagcttccaataaactatctcgtctttcatcacactttaccacttaccttgaattctttcctgtgcgagatccaagaatctcctcctggggtctggatcaagaccactgtattagtccattttcgcactgctataaagaacttcccaaggctgggtaatttataaaggaaagaggcttaattgatttacagcttcgagtggctggggaggcatcagaaaacttacaatcatggcagaaggggaagcaggcatgtcttacattgtgacaggtgagagagagggagagcacgtgagactgcaagaagaactaccatttataaaaccatcaaatctgatgagaattcactcactatcatgagaacagcatggagaaaccgccgccataatccaatcacgtggggattactcgtcctctctcaacatgtggaaattacaattaaagataagatttggggctgggcgaagtggctcatgcctgtaatcccagcactttgtgaggccaaggcaggtggatcacctgaagacaggagtttgagaccagcctggaccaacatgttgaaaccccgtttctactaaaaatataaaaattagctgggtgtggtggtgcacacctgtagtccccactacttgggaggctgaggcaggaggatcccttgaacccgggaggtggaggttgctgtgagccaagatcacaccacactgcattccagcctgggcaacagagtgagactccatttaaaaaacaaaaaaaacaaagaagaaagcagctctttgtttcagctaggagcggtggcttacgcctgtaatcccaatactttgggaggccgaggtaggtggatctcgaggtcaggagttcgagaccagcctggccaacatggtgaaaccctgtctctactaaaaatacaaaaattagccgggtgtggtggcaggtacctgtaatcccagctacttgggaggctgaggcaggagaattgcttgaacctgggaggcagaggttgcagtgagctgagatcatgccactgctgcactccagcctgtgtgacagagcaagactccatctcaaaaaaaaaaaaaaaaaaaaagatttgggtggggacacagagccaaacaatgtcaactcctttttccagtaacagaggcaggagtattccttgagtccgggagtttgagactagtcagggcaacatggtaagactttgtctctgtaaaaaattaaatataattaaggaaaaaatagtaaaataaataaataaatatatatatgagggaggaagtctgtcccattcctattgtacctcaattcccccagagagatttcatccttcttattcttaaggagacagggccaaagatctcatcttccgaagctgcttcctgctgaacagggttgtcatccttgcctaattttgagggcactgaaatctctcgcttactgttttaaagacctgtaaaaactgggctcctcctgggatggtgtggattggaatatttgggccattattagcttgattcagaactgttgaagcctggaagacataaactttaaccatctgtacccctgttgaatataacaaataatcattttaaaaatcaaatagcacccaatgataattaataaaatgcttaagcccagtttaacaatgtttgtaaaaagaaattggatggcatttggaatctaagtgaattggttggaaaaccagcctcctgctgtctaaaacataaagcaagtggatttttaataagagacatgttttttttctttttctttctttttttttttttttgaaacaaggtctcattctgttgccaggctggagtgcagtggtgcaatctcagctcactgcaacctctgcctcacaggctcaatcaattcttctgcctcagcctctcaagtagctgagattacaggcttatgccaccatgcccggccaattttttttttttttttttttttgtatttttagtagagacaggggtttcaccatcttggccaggttggtctcaaactcctgacctcaggggatctgcctgcctcagcctccgacagtgctgggattacagttgtgagccactgcacccagccaatagaggcatttttatggaaacgggggaaaaacaaatattaatagtgggcataatctatccagagaatgttagtttggagttgtagcctggaaagaatttaagatctagtccaaattgcagaaaataatgcaaaaaaaaaaaaaaaaaaagaaaaaccctcaaaaacgacagacaaggctagaatctaatagcatgtgtatgataatgtttttctctctagtctctcatttttattaaaaacaaattatggtacgatcaatttatttacaaaataagttttagtcttactattcttggcctgatgatttgcataaagtttaccaataataattatttgccttacaggctctcttaaactggctttgctgaaactttttacataagaaatctcagattcagacttgttaaagcctcaagcccagccacaaatttatctgttcctgcaaatacctgtatgaattgggtgaattcctctcctctggaggtcccaagataacttggggttcttgggccattagaaagtgacattcttttctcaccaggtacagagactgcatagaccgagtatgatgccagtcttctccaaggggcttttatcagttcttggagtcaacctcaatttttaaaaaatcagtctaaaagcataacatttcagtcaaagccttggtaaaataaccagtctccaactgtgtatttttacaaaagaaaacagattcttatacttattgttttttggtggtggtagttttgtttgtttgtttgtttgtttgttttttagatgaggtcttgctctgtcacccaggctggagtgcagtggtgtgatcatagctcactatagcctcaaactcctgggctcaaggggtcctcctgcccttgcctcccaaatagctgggactacaagcacatgccaccacatcaggctagtttttaaattattttttgtagagatagagtctcactatgttgcccaggctggtctcaaactctttgtctcaagtgattcccctgccttggcctcccaaactgttgggattataggtgtgagccactatgccagccccatatttcccttttgcagcacttgatcttggctgcatgaatccagttgcttctgtgttttgccatgtttgttattccttctcagcctctagaacgaatcctcttaaatatcacatctttgaattactggggttcctggttgtattagtctgtactcgcactgctataaagaaataccaagactgagtaatctataaagaaaagaggtttaattgactcatggttccttaggctgtacaagaagcatggcaggttctgcttctggggaagcctcaggaaactcacaatcatggcagaaggaaagcaggggcaagcacgttttacatcaccagagcaggagcaagagagagagtggggaggtgcttcacactttgaaacaagcagatctcatgagaactctatcacgagaacagcaccaaagggatggtgccaaaccattcacagtccaggcacagtaggctcatgcctgtaatcccagcactttgggaggccaaggagggtgaatcacttgaggtcgggagttcgagaccagcctgggaaacatggtgaaaccccgtctgtactaaaaatacaaaaactagcctggcgtggtggcacacacctgtaatcccagctactcaggaggctgaggcacaagaatcacttaaacccggggggcagaagttgcagtaagccaagatcgtgccactacactccagcctgggaaacagggcaagaccctgtctcaaaaataaataaattaattaaataaaaagtaaaccactcataaaggatctacccttatgatccaatcacctctcactaggtcccatctgcaacactggggattacaattagacatgaaatttgggtggggacatagatccaaaccatatcactaggagatctgtcccaagcccacttctctatttaccctcagaatagttctcaacctttccaggccatgaggtagtaccactcgggattgctttcagatgcacacaacaggcttacccacatcaggattatttttctctaattgttgccaggaaagggatcctgacccagacaccaagagggggttcttggactttgtgcaggaaagaagtcaaggcaagtcacagagaacagtgagaagagaaagcttattaaaagccacttagttacagagtagggtgtcctcagaaagcaagaggagaaatgtctcatctttgttttaaatttttcttatatagggtcttacctatataaaagttaagctatatctacctgttggggggctgacagtgtcacaagatttattagtttgttgatttaaagaaaactgttcttggcattttagtgcataagtacatcaaagcatgactataatcctttttttttttttttttttgagacggagtttcactcttatctcccaggctggagggcaatggcgtgatctcagctcactgcaacctctgccacccaggttcaagctattctcctgccttagcctcctgagtagatggaattacaggtgcccatctgcccaccaccacacccggctaatttttgtatttttagtagagatggggtttcaccatgttggccaggctggtcttaaactcctgacctcaggtgatccacccgcctcggcctcccaaagtgctgggattacaggcgtgagccaccgtacctggccaactacaatcattttaaaagcatgtattattatgcaataccaggacatctggacatttttttctgtcatagtttatccttgcaggcattgttaagctgtttcctcagctgtaaacatcatataaccacaggtcatgatagacaagaaatgtgccttgccagttttacgatggagttgattttaaaatggtgccactctggctctcctatgctcctgcttccctaacatgatgacatgcagtccagaggtaggcagttcagggcgagtgtggtggagccttcagtcccaggttcattccaactcttcactctgctggctttagtatgtggcttagtgcctgtattaggccatacttgcattgctataaataccttagactgggtaatttataaagaaaagaagtttagttggctcacggttctgcaggctgtacaggaagcatggcaccagcatctgctcggcttctgaggaggcctcagggagtttttactcatggtagaaggcaaagggggagctgtctggtcacacagtgagagtgggaggaaggcagagaggtgccacacacttttaaatgaccagatctctcaagagttcactcactgtcacaaagacagcaccagggagaaggcgctaagccgtttatgagtgatccacacccacgatccaatcacctcccaccaggcccctcttctaacattggggattacaattcaacttgaaatttagaggtgacaacatccaaactatatcagtgctcaagctcacagatggctgctacccttaggtatcacatctgtacctgaaatcacttgtacatctacaccaccaatcttattcatgtatttattcaacaaatatgtattgacaacctaccctgtgccaacactcttctgggccttgggatacagaagtgaaaaaaataaaataaggctgggtgtgacggctcacacctgtaatcccagcactttgagaggcagaggcgggtggatcacctgaggtcaggagttcaagaccagcctgaccaacatggtgaaacctcgtctctactaaaaatacaaaaacattagctgggcatggtggcgggcacctgtaatcccagctattcaggaggctgaggcaggagaattgtttgaacccaggaggcagaggttgcagtgagccgagatcacaccattgcactccagcctaggcgacaacagcaagactctctctcaaaaagaaaaaaaaagaagaaaataaaaatccctgatccctgttcttgtggagcttatattcaattggagaaaacagaaagtaaataagataaataagtgaaaaatagagtataataagtggtgataagtgttacagagaaaaataaagaaaagggaactgggaggatggtggggcatctggtaattttagacagggtggtcagagaagacctcactgaggaggttacatctgagtagagaacggaaggaagtgatgggaaagccatttggattcttgaagaaagagcgttctaaacatggggaagaataaatataataggatgtgcctggtttgttcaaggaagggtgcagaggccatcatggcaagagtggggcaggtgaggatagagtgcgggtcagatgaggtcaggaagggcaacgagaggacagatcccacgggatttctacaaatcctccataaggatttggcttcactgtgagagtaaagggaagcctttgataattttggcaaggaagtggcataaactgacctacaacttaacagcatggctttcatggctgtgctgagaatagcagaagcagagagaccagccaagagaccattgcagtaatccagtttagaggtgatggtgagttagaccagggtgatagcaatggaggtaatgaggagtgatagaattctatatatattttgagggtagaaccaacagaatgtactgatgtgggatgtgaaagagaagagacaaggataaaatctgaagctggaaggatgaaattgacatttacaagatggggaagactggaagtgaagcagatttgggggaaaaatatcaagatttctgttttaattatgagaagttgagatgtctatgaaacatccaagggcaagtgttgaatagacagttgcatctacaagtcagaaatctggagagaggtcaaggacagacataaatttgggaaccaacagcagagagaagatatttaaagtcatgaaactgaatcagaaaactaagggaattagtgcagagagtaaagagaagaagtctaagaacttagtatgcatggggactctggagatcagcggttaggagatgaagaggaaccagcaaaggagcctgaaaaggaccagataggtaggtggaaaatcaggaagagtgtgtgggattccggaagccaagtaagtaaagtgtttcaaagtgaagagaagatatgactgactatgttgtatgagatgaggactaagaattggccattggatttagcaatgtgacgttccatggtcatatgagtaaaagcagtttcaggaaagtggtggggaagaaactatgaggatgaaatgccaaactcaacaagaacaactaaaatccatggaataaaattcacagggtagacaaaaaaacaaaaacaaaaatcctcaatgaaagaacaattacttcaatcaacaacttcaacaaatatttagtgtttatcatctatgtgccaagtgacattcgaaaaattcattggcaattcagtgatgaagaaaacaaagtacctatacttatggagcagatattctattagggttaaagagacagtaaacaactaaacaaatatacagtgtgtcagttgctgataagtgcttcaaaaatcatacagaacagaaagaggatagacagtggaggcaagtggggtggcaaactactttagataaggtgatcatcaaggcctttcggatttattagtagagagctcatcttataccagttagaattgggatctttgaaaagacctgttaaaaatatataaacatatatatatatatatatacacacacacacacacacacacacacacacatatatatatatacacatatatatacatatatatacacatatatatacatatatatatatacacacatatatatttctgatggcaagtctgagtaaatacaagagaagtcacaatttaattatctttggcacaaagataattaaactacagttgcagatggcatatttttagcattagggaatagaaactattatgtacagtattatgtcccccaaatttaaaatctacataaaatgcatgattttctagaaaaaaagacaaagtgccaaagttgactcaagaaatagaaaacttgagaagaacaaaagaaaatataaaaattagtttaaggctgactttgttagatttatgtttaagatcaggtctaaggacctgctggtttctcaggccaatactatcaaagctttaaggtacaggtaagtcttgccttatataacttgttcagagaaaaggcaaagaaggaaatagtcccaatttattctttattttgtgttttcacaaacacaaaaccaaaataaaacataggccttccttgtgaaaataaatgtaaagatcctaagtaaatgactaataaaccatatctagcagtagttccagagaacacacctcaagcccgagcagaatgtatcatagaaggccacaattgtttggcattagcgaatccattaatataatttactacattaacaaattaaaggaggggaacacctagttaatgaaactaaatacccaccactgatgaaaagtcttacaaaaataagacaagaaatttatttgacatattaaaggatatctgccagaagcctaacagaaagagcagaacagatgatggaatattagatgcttttccaccaaagtcaggaacaagataaggatcgccaccagtcagcattatgcttccaaacctaacccatgcaatgacaagaattagaaattagttataaaaattagaaacaaagaaatagaactctcatttgttgcttatatctcattcccataacgtctaagaaaattaagaggaaaagtattagaattaatgagggctcagtaagatggctggctataagactaataaacaaaatcaaatgtttgtctttaataaacaataatgaattataattaactaaaaatcacaaaataccttgaaataatctaattaagccatgcatagactctacatgaagaaaagtaggccaggtgcagtggctcatgcctgtaatcccagcactttgggaggccgaggtgggagaatcacatcagcccaggagtttgaaaccagcctggtcaacaaagtgagaacctgtctctacaaaaaattaaaacaaattagccaggcatggtggtgcatgcctgtggtcccagctacatgggaggctgtggcaggaggatctcttgaggctgcagtgagctgtgttcgtgctgttgcgctccagcctgggtgacagagtgagatcctatctcacaaaaaaaaaaaaaaaaaaaaaaagaatagtacaaagttttactgagagtcacaaaggaatgcccaaacaattacagaaacatggccggcagtggtggttcatgcctgtaatcccagcactgtaggaggccaaggtgggcagatcacctgaggtcaggagttggacaccagcctgaccaacattgtgatgtcctgtctctactaaaaatagaaaaattagccaggcatggtggcccacaccagtaatcccagatacttgggaggctgaggcatgagaatcgcttgaacccgggaggcagaggttgcagtaagctgagattgtgccactgcactccagcctgggcaacagaatgagaccctgtctcaaaaaacaaaacaaaataaacaaacaaaacaataagaattacagaaacatgccatgttcacaggtgaaaagaatcaatattgtaaagataatggattccccacaaattgatgattaaaaactgtgcaataccaatcaaataccatcaagatttttaaatagaacttcacaagaagattgtcaaattcatatgaaagagaaaatgtataaggataactaaggacaatttttacaagaagaacaagggcccatcaaatatttaaaatatacaatagagccagagtaatgaaaaaggtgatatttgtataagaatgaagaaatcagtggagagaatagagcaagcaatagacccatgttggtccatttctacatgggaatggaatagatggtaaaaatgacattttataccaatgggaaaggataagctagttagacaaaaagttttggggaaaatggatatatatttgagaaaaaataaagttaggtatctcacaatatataaaactaattccaaatgaaatcttggtggtagaaaggctttcttaagcaaaatttaaaatacaatcatcagccgggtgcagtggctcgtgcctgtaaccccagcacttttggaggccaaggcgagaggactgcttgaggccaggaatttgagaccagcctgggcaacatagcaagactctacaaaaaaatacaatagttagctgggcatggtggtgtgtgcctgtattcccagctacttgggagactgaggtggaaggatctcttgaacccaggagtttgaggatgcagtgagttaatgatcacaccactgcactccagcttgggtgacagactgacagcctatctctaaaaaagaaaaaattaaaaataataataaaaaaacacaggaacacaaaactatctattactatctattgatctatctatctatcgtgtgtgtaaataagcaaaacctggaaggacagactttgttctgcacattttaaaccagtagtagagcttaaatttggtgaggagggaaagaattgcaggggagtgaaggtgacatttttctacccagagttttttttttaataagaagacattcccagataatttatataattaaattttttaaaacgacctctttattattatataaatatgtggcaggaaaattaatagggaacatttattttctttcttagacattttcaacatttttttcccctgataaatctgtatttttttaatagccagaaaaaatgcaccaaagtggtttcccttctgaaattatttttaatggtgtttggctcacagcagaatgatccaggcccatccgtgtcctggctcagggcccaggctctctccctggcagccagcgaggtgatcttgccagagctatcccaactgctgcctccctggctgccagcatcaccttggctacctgcagagacactcctgccactgcctcactggtggggagagctccctcctgttgcaacactgattaatataagatgagtggaaaagcaaagggagggcaaatacagagggccaggccgtgcaaaggagaagtccgtttctgcagcattgataccaggtcccacgtcaatctctctgaataatctggccctcgcagtttctctttggagaaatttgagatacgcttcccagcagctgggtcaaagggcctttgaatacagcgcctcattgcatatcccttcccacctgcactggtgttgcagaccatggggggcacctcatctctcccctacctcaagggggcttctctgcaggagcttacagaatggctttagctttctctgcccccctatgtcccctacaacgtattctagtgactcagtcctgggccctcctggctcaagggaagtccatatatccatgagtggttgtaggagggttgccggcatgacccagctaacttactgaatcaccttttcagatttggtgccttcttccaggtctcttgcctgggaccttcatgcgcctaacagtctcttttgctgttttatttgaagcatagaattgtagcctgagtctttcctcagtttattttgtgattgatcctccttaccaagtgtttatcgtggttccagtgtgtgtgttggggggtgattctaaagaacactgcttgtgagtcacgctgctctgttaataaacctgttatgcaggaaaacccagctgaaaggcagatccaagctgctcactcccagctgttagtaagtggatacaatggccttttcattgggtatgaattttagtctattatattttctttagaaactaaaatcagctcatgagaagttaaagtaatgctgactttgtttcataagaaataaaaactcgactcaggaggaccccagccattatttgtggctcacattctctaaacttcatctgaaaagctgatattccagattccttacatctctccaagatggctagcatcttatacacacaaagatgggggggggttttactcagcaagaaaaatatttattttcctttttttttttaggagaaaaatacttgtctcttcaacctcattaatttttatgatgcgtaaaattttttcattacattagccaaaaagactctggactgaataaagtatagcacccaaaccatttaaaatggcttcctgactgggaagacactgcagtcatctcagggaagtttctggccttgggaaaaacaaatggaactttggccgttcaagaagggaaactcaagaatccaggccttgcgtgctgctcttttttctctgaaagcttttggaagtggagccacactttatttaccgaatatgcacttcttgtttcttgtaaccatggtgctttagttgagtgtgtcttatgtcagactactactgagccaatatttatcattttagaaatttccatgagtcataaaacaaatgtgcaacccgcttgctgtaccttctacgggagtttctttcctagagttctttaaagcaaaaagaaaaaatgctaaacctagaatccaacacttgccgtttatcagaacacttacatactttctccagcatggaggctccttctgtgaaatttgaaaatccattcagctcacatccaaggtgtgctgcctgctgcctgaggtaccctgcctacccaggactccaaaaccctctccagagggccaggtctgggctgagaaagaaaggaggctttagaggtttgcagagaggaagtgactcactggctcaaggggtgggagggaaggctttccacaggatagagaatataaatgagcaagcaattccttccacttccagcatggaaaattttactaggggaccacctcttaatgactgggcctgaatttagtgaccactcacctccactcccccttccaaaaagaagagtaaagaaaaaaaaaaaagcaggaccaattgcaagatgtgatgttgtttgcctcatttacacgtaaggatgttgaagctaatgctgtttgatctcttgtgtcaatcagctccctttgcccagacatggatagttgggagaaccacattaagtctacaatctagaaaactacagcaatttattgcttttgccattaaaaaacaacaacaacaacaacaacaaaaacaagtcctctagagccctgttttgtctagagcccaaggcctagagtttataaatcaaaatttaagagactgcgttagtattactagaacaggatacttcacgaattgctaagactgtgccaggcactcagtatctcttctgtggagtgcaagcatcaccttttagagttaaaagggtcaaattagtcaacatcttgagtttacaggtgaggacaaggagtcccaaaggggtgcaccttgcagaggtcctatggctacttaacagtagggctaggcaagactagaatttgtgtcatccagagcacgagtccccacccctgggccatgaaccagtattggtctgtggcctgttaggaatgcggcgagtgagcatgaccacctgagctccacctcctgtcagatcagcggcggcattagattctcataggagtgggaaccctattgtggactgtgcatgcaatgaatctaggttgcacgctccttgtgagaatctaactaatgccagatgatctgagatggaacagtttcatcctgaaaccaatcccccgccaaccatccccctgccaccccgtctgtggaaaaattgtcttccacaaaaccagtccttgatgccaaaaatgttggggacctcttatctagagtcaaatacctcaccgaaggactggcagtggaaatattggagcaaaacagttacagtaaaaggcactcaaatttcaaatcatgaccattggcctttggctatctgtttttggtgtttgttttccttgaatacaactcagagttccctcatcaggaagagctgggtttctttggctgaaccatcatttgacatccctcctgctacccccgagaagacaggaaaattaggaggtaagccagagcagaccccaaagaaaataaaaaaacagggaggaaacccattacatatctacatctatcttatgtatcttggtccatagggtctaattttttttggtaggacatcaggcattctcttcctccaaatatccaactttgaataaaccctccagccatctcttccatattcatatttgccaacataagtgacgaatgatgtcattaacaaacactcacttccttcctctgtggatgctccactcatcaaagatccagtaacatctccctggtgtgatctgctgcaccaggtaggatcctgagaattcccaagggaacttgggccaagtttatcttggcatttctgttttcacttgtgatctccttattcatcttcatattcctggtagctaacatggccgcagctggcacacagtaggacctcaggaaacatcctcaaatctaaatgaaaaaatgttcagttagatttgacagtggcttcccattgtgaatataaacaagttgcccacctgcatgcactggtatcacctccatatcccagcagggcttcagcactgccctgacattacctggcagcctctggggtgggcgctttgctggttctgagtttttcctgccctgtagttgcagcgggtgaggcagaagtctgcagggaataatgggacgagctggggaaaaatgagtcccaaccagagagcttgccacaaccagcccattgctgtctgtgacatgctttttcctcctctgactgtcactttcctccctttcttaaccaccgtgtgaaacagtcctttcattttttctaaagtgacttattctgagcttttagaaaaactctcttgtttttacatgttaaggtttactgtgaaatttctagtctcttcattcctatccttcatgattttatgacttgtgattacactcaatcctacatgctgaagagtctgaactcatttcatctatccttaaaaaaatgcttgatttccttgttttcccctttctgaatattttgtggttcatttttctttctccggaagtacaacaaccggatcagaagtgtaaaaagaatgtatcatggaggttgggcatggtggctcatgcctgtaatcccagcactttgggaagccaaggcaggcagatcacgaggtgaggagatggaggccatcctggctaacacagtgaaaccccgtctgtactaaaaatacaaaaaaattagctgggcgtagtagtgggtgcctgtaatcccagctactcgggaggctgaggcaggagaatcgcttggacccgggaggtagaggttgcagcgagcccagatcgcaccactgcactccagcccaggcaacagagcgaaactccgcctcaaagaaaaaaaaaaaaagaatgtatcatgcttatgaaaaatggaagacaacttggagagatccccaggatatagtgctgaatgaatgaataaaaacaggctgcatttctgcatgtattgttcagaccgtttgtgttttacaaaatgctatattttataaagttctgaaaggctctgtgttgatgagaggtgtgatgcccactctgaccttgatgtgtgtatgtgtgtatgcaaggaaccgtgggactgttcatttatccttgcactggatttgctttttagaacatttcccaaaaactttcttgaaatatttaatttattagatgggcttcagggcagttcatgagctccctaaggttataggccaagctttgtgagtagaaacaaatgtccgtctttctagagagaggttttatacttttttttaatttgttttgttttgagatggagtcttacactgtcacccaggctggagtatgacggcgcgatctcggctcactgcaacctctgcctcctgggttcatgcgattatcctgcctcagcttcccaagtagctgggattacaagcgcacactaccacatctggctaattttttgtatttttagtagagatggggtttcactatgttggccagactggtctcgaactcctgacctcgtgatcggtccgcctcggtctcccaaagtgctgggattagaggcatgagccaccgcgcccggaggatttatactttttataagaatcccaggccgggagcgatggctcacgcctgtaatcccagcactttggaggccaaggcaggcggtcacaaggtcaggagttttgagaccagcctggccagcatggtgaaaccccatctctactaaaaaatacaaaaacttagccaggcgtggtggcacgcacctgtaatcccagctactcgggaggctgaggcaagagaattgcttaagcctgggaggtggaggttgcagtgagccaagatcacgccactgcactccagcctgggcaacagagtgagactctgtctcaaaaaaaaaaaaaaaaaaaaaaaaaagaatcccaaagggaatatatatggcctaagagggactaagaaccactggttgagataattgtactactttgtactccattttctcactgtttaactcaagaagcatgctattatctgaaaaacatacataattggtcaacctttaatgttataaaatagtggtatatgatttttactctaccataacgactaatagagaaatcaataatgtcaccatgtggtactgtatccttcccacaaatatacttaaacatatttagccttttcctaaaatagatgccagggcccttggggctgtctgatccatcagcaccaggctatgggcagtaaggaatgttcagaatgtattttctacagcttctatttgttttactttgccaattaacctcctctgtggtgttaagcaagcaacaagacatacctcatttctcttgttcagcctcactcacaagtgctgtgtcatgcggcctgttggtaaagggcttgggatcagatcctgtactcctctgggctcccaaggaacgtctcttcaccttaccccatctgtgggatgaggccagtgataatatctaactgtggcagtcactactggttatctcccaatatccattttctccttcttccttagtaaaggaacaatagtgtcttagctgagcacactgctagtcagagaacagaccatgtttcccagcttcccttgcagccatatgactaagttctggtcaatgagataaaaggagaaatcctatatagtacagggtatgtggtctagaaatatggtatatgtttctggaacccaccctccctccctccctcccttcctacctttccttcctccctccctcccttccttccttcctttctgacagagtctcgtgctgttgcctcccaggtcaaacaattttcctgcctcagcctccggagtagctaggactacaggcacatgcccagctaatttttgtatttttactagagacagggtttcaccatgttggacaggctggtctcgaacttctgacctcaggtgatccaccctccccagcctcccaaagtgctggaattacaggtgtgagtcacctcctccccaccaccccaccagtttctgggatctttctataaaaaagtggatgcttatgctgggcaacatagggagatcttgtttccacacacgaaatatttaaaaattagctgggggcagtggtgtgcacctgtggtcctagctacttgacaggctgaggtgggaagattgcttgagcctaggaggttgaggctgaagtgagcggtgatcgtgccactgtaactccagcctgggtgatagagcgagaccgtgtctaaaaaaaaaaaaaaaaaaaaaagaggataccctttttatcttttttcctccttcttactgcctaaaatgtggaagtaatagctggtactctagcagtcatcctggactgtgaggtaaccttagaaagacaatctatgcacaacaaagcaacagtatagaaattggggccaggtgtggtggctcatgcctgtaattccaatactttgggaggcggaggcaggaggatcacttgagtccaagcgttccagaccaggctgggcaacatggcaagactctgtctttacatacacagacacacacacacacacagacacagacacacacacaaattagctgggcatggtggtggtgtgagcttgtggtcccagctactcaagaggctgagattggaggattgcttgagcccaggaggtcaaggctgcagtgagccgtgtttgtacaactgcactccagcctgggtgagagtgagaacctggctaaaaaaaaaaaaaaaaatgaagaaattgggttttgagcaccatcaagtcaatataacaaatctgaattgtttggcactgtacttctatgtgtgaagtaaaccatatacacatacacacacacgtaataaagccttaagcccttattttgtaagtctttgttacttgtaactaaacacaacccttactaaactaccacttctttgattcatttaaactactacttcttcttcttctttttttttgagaaggagtcttgctctgtcacccaggctagagtgcagtggcgccatcttcgctcactgcaacctccgcctcccgggttcaagcgattctcctgactcagccacctgagtagctggaattataggcacccactaccgcgtccggctaatttttgtatttttagtagagacggggtttcaccatgttagtcaggctggtcctgaactcctgaccttaggtgatctgcccatctcagcctcccaaagtgctgggattacaggtgtgagccaccatgtccggcaaaatgcacaaatcttaagttttgacaaatgtgtatacccatgtaactttttttttttttttgagatggagtctcactctgttgcccaggctggagtgcagtggtgtgatcttggctcactgcaacctctgcctcctgtatacccatgtaacttgaacccctaacaaagtaagaaaaaaaaaatgaccatcacccctgaaagctctgtcagacccctctgcagtcaatctccactcccaccctatttaacacttattctgatttttttcactatagttttgcctgttctaaaattcctcaaactttgaataaactgtcagtggagagtaagtagatgagattgtcaactactgtaggagggattataaattggtatatcctttttagaaggctatctggcaatatgtaattagtgaaataaaatttatgcattccttttgacttagtaattttatgggaggaattttctgagaagtctaccagctcatgtatgcaaagaagccagtcccaaggctgttcactgaagaaccgtttgtgaaagcaaaggattggaaatatcctaaatgcccatcagtaggggaaaagttaaatgaatgaacagtcacaccttgcagcaattataagaaatgatttattgataatggcaagattgccaggacaatcattaactgcacaaaagcaagttacaagatgctacataaccaacataaaaccattacacagaacaccaataaaaacgaaacacaaaacatatgcccaaggtctatttctgttagtccatacagcaaactgacatcagtggttacctctgaggagaggactgggattatgggaaaagagagaaggtgctcaaaggggtttttcctttgttgtattgtttgaatcttttacaataaaactacacttgtgtcttagaggattaagttatttttaaaagagactactgacggccgggcatggtggttcacgcctgtaatcccagcgctatgggaggccgaggcgggcggatcacttgaggccaggagttcgagaccagcctggccaacatggtgaaaccccatctctattaaaagtacaaaaattagttgggcatggtggcagatgcctgtaatcccagctactcgggaggctgaggcaagataatcgcttgaactcaggaggcggaggttgcagtgagctgacatcctgccactgtactccagcctgggtgacagagcaagactccgtctcaaaaaaaaaaaaaaaaaaaaaaagactactgacataaatagggataggagataggaaataggtgaatttgtggagagggaggagttaaaagtttttttctatgctgtatattgacagtgttatgtctcccagcaaaggagctttccccagcctatctattaatacacatctctcttcaggctcctcgttaatgtatcatttcttcttccctgccgcttatattaatggttttaaattcaagtgcctatatgttcacagattaagtatgcaaaatgttttctaaacgaaattgaaatataccaatctcatatttaaggagagaccttatgtgtcttagtctgttcaggctgctatagcagaataccataaactgggtggcttacaaacaacagcaatttacttctcatagttctggaggctgtgaagtccaagatcaagtcaccagcagattcagtgtctggtgagagcccacttcctggttcatagatgaacctttttgctgtgttctcacaatggtggaagtggcaagcagtagtctaggacctctttttttttgagacacagtctcgctctgttgcccaggatggagtgcagtggcacgatctcagctcactgcagcccctgcctcctgggttcaagcaattccctgcctcagcctcctgaatagctgagattacaggtgcctgccaccacgcctggctgatttttgtatttttagtagagacggggtttcaccatcttggccagcctggtcttgaactcctgacctcgtgatccacctgcctcagccccctaaagtgctgggattacaggtgtgagccacggtgcccggcctaggacctcttttataagggcactaatcctattaaagggggctctgctctcatggcctaatcgctgtccaaaggccccaacttcaaataccatcacattggggattacctttcagcttccggagggcataaatctttattagtctatagcattgtatgaaaactctttccctccgtgtggagaggaggaatgtcaatgtctagaaaagctgggtgttaaatgcagaggctgaagttcagtgggacctaaaaaaaatgggggctcatcttaagttatgataaactgatatataagtttgataaattgtaaaacatcttcagatactggttcacttattcaatacttattaaacacctactatgtatcaggggctatgccagttcatacatacgcatcttaaataccccatgacctcaaggaactcccagctatctggtagtaatggaaaatgcacataaataattacagagctacagtaattgtagggaaaaaaccatgaaacctcctaactcaaagtatagcatctgcatctcctggggccatctaagactccacccctcaaccccggaatctgcagtttaacaaggatctcaggtgatttggatctttattaagatttgagaggtggccgggcgctcggtgtctaaggcctgtaatctcagcactttgggaggccaaggtggccagatcacctgaggtcgggagttcaagaccagcctgaccaacacggagaaaccttatctctactaaaaatacaaaattagccgggtgtggtggcgcatgcctgtaatcccagctactcgggaggttgaggcaggagaatcgcttgaacccgagaggcggaggttgcagtgacccgagatcgcaccattgcactacagtctgggcaacaagagtgaaactcagtctcaaaaaaaaaaaaaaaagatttgagaagtgatgaactctgggattatagaaggaactaggggggtgaaggagttgtaaggggtacggggcacgaaaaaaaaaaaaagaaggaactactattgatccttgggaagtggtaagagaagtcttcagatgcgaagggtgataggaacatcccaggctgaaaaaataagcaggcccatgatcaaggtagttagaactagtaagaggtgttctggaatgagaagtttcgtctgggaggggcagtgggcacttaggaagatatgggagatagggcagaaaaagtaggctgaggccagaggcagacgggccagactgacctgctgagggttatggaggaagccacagcaaattttaagcaagaatgtaacaagaccagtcttatgtttggacctaactctggtggcagagtggaggacgaaatgcaggagaggctggagcaagcaggcaggcatgtatccttaaatgagcaccattcacttttggactagaaaggaagtctgaatattaagaagtgtaagggccacagggtcctaggcaggcagaaaagcaaagggttccagctgcaggaggatacaggggggttccttctcagttcaggagtgtggtctcggactggcatcttcagcatcacctaggagttgttagaaatgcccattctcaagcatcatcttagaagcagtgagggaaccttggggatggggcacacaaatctagctttgaacaacttttccaggtgattctgatgcatgctaaagaaccactgctctagcccgccaaaaatcatgtctcaggtggtaaaggcttagaactgcacaacttactgtcttttttaaaaagaacgagggtaatgagaaatgggttcctatgttgagtggggcagaacaaaagccacatacaacctagattttacgtagtgccggaaaaaaaaatactgaccatcttgtccaaaagtctcatatttggagaattaaaatagttttggtcgaggccatgatgttctcggtaacctaaattaatttataaaattctttgttccctttatttcccacaaaaacacccgcagcaaaaacgctgggattcatctgggccctctgaaaaccgtgtttccgacgcaaccgcccattagaaaaacacaattccaaattaaaaacccggagaactgagcggcggggctggcgccaccgtcccgggacagcgcggcctttcccagccacacccctgcgcgccgccggcctccttccccggcagttcccaaagataaataaatgctccttgtttttccagacctgaaattaacggtgactcacagagcactctgcatggccacggtcgcctcgggaaggaggaaaaatgtgcagacttttttcccctcacgcgagggcaggacaagccagactgggccaatcaggggagggcggcgggaatcgcaccaaagtaggtaaaaaatgcgggaggcgtccccgctgccgcggcccgcgactccgctcccgtgggtcctcccccagtgcgttccccctcctcgggccctgccctcccaacccccaacatctctctccttccaccactgtgtccctctccctcacctctccccttgcccccacctcccccactaagtgccccctcgcccctccccccacatccccctcctctccccacactgtcccctctccctcacctcttccctcccctctccatcctcctcctcccccaactatgtgcccctcgcctctcccctccaaatccccctccttcccacactctgtacccctctcccccggctctcccctccttttcccctccacggcctcgccccgccccagcggcaggcacacctggccaggtggctgcctccccgcgcgggccatgcctgcacagtgggtggggcgtcaggtggccccgccgaggaggcgaaggaaggccacccctcccccatcatcttttgcccgcccctcgccagcaggagccagcccagtccgccttctagcctcctgcagaccagagaggacgcacccccacccctaaacactttctggtgaggcggaccctgccccgcagccttcagcagatgagggaagctcccctccgagactctggatagccgccgggggggcgttgcctggccggctggttgcgtagcaacggcaggcggtgcgtgacgtgcgcagccgcgttccgtcctgaggcgcgcccgccccggggtaagctcgcgccgccgcgtcagctcagcgctgggtctctcggtcccgcagccgtgaggaggacggtctgcatactcgctgcccgccggctccctcccccgcgtccctgcgaccgccgcggcgaagatggtgagtaggagggaggccgaggcgtgggccgaggcggccgggagcagtgtgtctctggggcgccgcggagtcggggctaagggggtgagccgtgcctcagcccggggagggacccggtccggctgcagtgtccgggctgcgggtgagggggggtctctgggcctccgtctcccgccgtcctggctgggcccccgcgccccggggtggatccgcggctgttgcgcagctcccagctggggcgaggccgccgccctgagcgtggcctctgcgggtgtctccagacccggccttgcaacaactggctggggtcgagcgcccccacccgctctgtgaaatccatccgggggtctgcacaccgaggccggggagtggggggcggggggcgtcggaatccggccaccgtccttgttggcgtgggtttccccagagctggcgctgaggcgcttggtgacttgtgcgcgttccagcccttgaggtctgtccatctcaataaggaagataaagcctttatggaacagtcctagagcacggaatgatcgctaacgagcaggatcctggcatgatttagaacggggtggccttgcagctcctttgtttttttctttttatctggcaatcggcttccagcagcactctcgtcgtgcttgtcaagcttggcagtgtctgttttaacccttccctgcccgatctgtccgtgtatggttagaattttttttctgacctgtagacagttggactctgccagaacttggtgcgcaaggtgtgggcatgatgctgggatgctgatacaaccaaatttaagagctttaaaaaccattaaaatactggagtcaccagaaagtaaacaggtgctcattagtatattctatatgatggacattttgcttaatttacatattttccccctttacactgtcactctaattagctatttaaaaacgtattctcaactgaactatcagttggaacattttgtcgttttcgttagtgtgcacacactgttaccatttttggtcagtgatttgcaggcgtagccttaccagactttgctagaaatattacactgtaattgcatctgtctagaagcagttggtaccagcttatctgcatacaaactgttttcactgtataacagttttggttttcttaagttactacaacttccgtgaacatgcaggcggccccttagtgaaagaaaagataaaccggtagtttcttgatgactgtagatatgtatgtaatagggatttgatactgttcagtttttggttcttctttggtttaatgctgtaagctacaaagtatcagcatcttgagtctttttaatatctaattattagaaatttaataacattttaaatgtatatgctactttatactgaaagacttaatctaggggctttgagttatggtacgcttaagaccattcactctgtgaaagtgctttgaagctgactagggtctgctctagagacttctgatttgacattatgcttttttattgagtggctaatacagactttatttttctgtttgaaaataagagaccaaacattttacctttagttaaatgcttagttttagttaaagcttaactaaattcaaggaaggaagggtctgttatatttcctggttcttgtgaggagtgggagaaataaaaattagaaatgagcgatttccaaatacgcttcaaaattgttggctttagggagatcaagaagaccttacaagttactcttagagttcagattatagaccccccatttttaaaggttatttttgtttttagccttatgagcgcaggagcatctttgtttagttcagtgattagagaatattgtgggtattatcccagagtctagcactttgcttttagctcttttggttagatgcttggttccaagtttcttttaagattaaattttaactaccgatgggtttgttctaaattagcagaatcacttccttgtactcaccaagtcttttagaagcacctgaaataaagcagtttgaaaccagctgggcgcttcaggatgagattagatgttttcagatgtctcctccaacaaaaaacaaacaacgtctgcctccacgtgaaccacaattacagaccccaaacaaaacgtgtgtgtgtgtgtactgggtgtgccagcctccttatacagagattgtttagtagcccatcatcaagttactaaggttatttgctcagtagttctactggatatggattgagacatcacacctagacttgcctagctcctcttgtaaccagagtatcttttatgcttcttggaaagtaagagtgtagtcttgcccctgaagtagagttaaaaggtttgcacgataatctaacccttaaccttatcctaatctggactgtggtctcacagactgaactaattggcgcagtattcaagtattctaatacttggtgattagcaaaaacactacaacccagtgaaataggttgggcatgtattcacatgcctatttaacatatgagaaaacagattgtaaaggattaattgacttgagacaaatcaccttttccaactccaagttttaaaataataattttgaaacattttaagcagaaaagtacacagaataacagatccttttgtacaggaaaaacagggctatcttattgccatatttcaggtttttatgttatcattacagctaaatatgcatcatcttcctcatcccactcccttccctccctagagttataaccattcctgtgtcaaagacataatatcctggctggttaaggagatgattttattcaggctattgcaattaggagagcattcctgattgccttatttgaaaatatgcaacaggccagttctttgcagttacctgtttcccagaacacaaaacggtggggtggattaaccatcactgctttctgagaacacagagctcaggtaaagttcacagtagtcacctgaaattgatattcattgatagttccatacttttagctacttaatcattcatatgtattgccttgatgtgcttttaaaacttacgtaaatactgtgcttcatgtatccttttgcagctctgtgagaaaaaattaaactttgtgggggtggttttttttttcccaggggagggcagcttttggatttatttgtagctttggttcttcaactgctgaattgtgttcttttgtatgattgtgcaagtttatccattcccctgttgatagacattcagccatttcctaattttttgcctttttttggtctatttaaagtttttataataggcaatttccatgtcatatattgctatatattacttctctagccccagtgtgtatctctccatggtgtatatctagaagcggaagccctggattggagcatacatattttctactctactactggttcgttctggttgtatctcatcattaacagcttgtttctacattgcctttcaccacttaataagagacttgaaacctttgccagtctgatggttgtgaaatggtttctcattattttattttgcatttctttgattactagtgagctgactcttttcatatgtttattgcatcttaggtttttacacgcatgctgcatcctgcaaacctggccattctgtaaatacttaccatcttcacctaagcttatttgcagagccataaagtaaatgtagcagtaaaaaaaaaaaaaaaaaaatcagctggatacagtggcctatacctgtcatcccagcacgttgggaggttgaggcaggaggattgcttgaagccaggagttggagaccagcctggacaatatagtgagaccttgtctgaacaaaaaaattaaataaaaattaactgggcatgctggcatgtgcctatactcctagctatttgggggactgaggtgggagtattgcttgagcctgggtgttagaggcttctgtgagctatgattgtactactgcactccagcctggccacagcgggagaccctgtctcaaaaaacaagaacatgattatcaataccagaacctcatactgaggagtaatatttctcttttctggcacataaatttctttccaggccccttagccagctaattaccagaagttcaatactctctgttaattctatccacctgccatttttaggcccctggtagtggtagaatgtagagtgacttaggacagagttctttccttctttgccaagggctgtggagattaatgtccttcactttacacttacccctctctttcctggcagttcttctagccaaaatgtaaaagcacacacagtagatatatgggaacaatgcacttctgctaaaatttgctgtgtacctaaaacttctctaaaaaattaaaagtctatagctgggcgtggtggcacgtgcctgtaatcccagctactcaggaggctgaggcaggagaatcgcttaaacccaggaggcggaggttgtagtgagctaagatcgcaccattgcactccagcctgggtgacagagcgagactcagtctcaaaaaaaaaaaaaaaaaaaaaattaaaagtctaaaaaacaaacatgcaaaacaagtaaacatgactgactttcttttctttctcctttcctttcctttttttcctttcttttttctttcttttctttttcttttcttttcttttgttttttttttttttttttttttgagacagactctcttgcagccacccaggctggagctcaactgcagccttgatctcctgggctcaaatgatcctcccacctcagcctgcggagtagctgggactacagatgtgcaccaccacacccagctaactttttaaaattttttgtagaaatgagattttgctacattgcccagactggtctcaaacaatcttcccgctttggcctcccaaagtgttgggattacaggcatgagccattgtgcctagtgactatttttcataaatagaatttgtttaaatcaaaattgtgtttaacttagtatacaggaagacttcaaatttttgagtttttatgttaatgtaactttatattttctttcagtaatatttgagatgaagcacactacatttgaaatttgaaaaaaaacttgcaagtcttgaaaaactgaatttaacatacaaatgcgttgattttgtccacagaacaacactctagtctctgagtaactagagctagtctctttgttgtactgtcatttgcatatgtaaaccacagagcataataaataagtagaatattgtgaaagcatttttttttttttttggagacagggtctcattctgttaacctaggctggagtgcaggggcgtgaacacaactcactgcatcgtccaccctcaggctcagtcagtcctctacctcagcctcctgagtagctgggactatatataggcaggcacaaccactcccagctaagctttgtattttaaaagctttacatatataaagatgggatttataaatataaatttatatataaagacggggtttataaagatggggtttcaccatgtttgcacaggctggtcttgaactcctgggctcaagtgatccacccactttggcctctcaaagtgctgggattacaggcatgagccactgcgcccagccgtgaaagtatcttgagtttacttctcttgtggcataacatttctgtctagattgtccatgaaagtcatacacaaagatttacacctaacacttcagcaatattgtaaccacaacttttcttctgttcatgcctcctttcattgatgttggaagtgagaagttttcacttggaattgtgcttctgaattacctcctgctcatttttcttgaaattttacaattgggagaggcatagacttagacaaataaacatcggttttattcatctcagtaatactttgggccaaaatgttatattcatcattgaatctgctgtactaagacccccattgagttgaatatttagagtgattcttagctccaagattagtcttctagaagctgatactgtaatacttacatgctgccaacactattccatgttttgctttgttatgttttacgtagattttttgtttggaggttctagcaggggagcgcagctgctcatataaccttgaccaaagaccggttctcctctatcaggaatggtcatcctctttgaccgagtgcatagctttgagagggatgcacatggagtggtgagggaggaaggggacacctgcctagccagccagatcagccgaatcaaccctggtgatcaatggggtgacagatgttgcagccagatcgccctcacatcatacgtagattttttaaaagcaattgatttcagtaaaaaatgcaattaaagttttaaaattaacaaagtaatctctaattgaaggtgtgaaaagactgagaacgtctgttgcagcacggcatagatgagtgcttgaaagatagaaacttaagttcattctacacctggaaggtcatttgtcattgtgtttgtgcttttggatcacatcaaaggaagattgtttactcctttgaacatttttacattacttcataggttgttatttctgtttgccttctcacaggaaagcaaggatgaatttcctacccttgtttctatcttggcttgctttcagaaaatagcttgtaaatgtaattagtgtttattttaaaatggtttcacaacttttctgttgctattttcatgtacaggtggagcatccctaatctaaaaatccaaaattctctaaaatcccaaactttttgaacaccaacatatggaaaattctacatctcacctcatgcgacaagtcaaaatgcagacaaaactttcacacatagaattatttaaaatatcatataaaataattttcaggctatgggtataaagtgtatatgaaacacaaatgaattttgtgtttggacttgggtcctattcccaagctatctcattatgtatatgcaaatattccaaaatttgaaaatatctgaaatcaaatgcttggtaccggaaggtacttaacctgtagtaatagaactaacactaaagcacagcacaggcaaatacaggtaaggcttctccaacttgccctggagcaatctttgaagtcagttgttgaagctcaggagttttgaggaattctcaaatcattgtaagaatctgcagcctgaccaacatggagaaaccccatctctactaaaaatacaaaattagccaggcatggtggcaggtgcatgtagtcccagctacttgagaggttgaggcgggagaattgcttgaacctgggaggcggaggttgtggtgaaccgagatcacgccactgcactccagcctgggcaacaaagcaagaccctgtctcaaaaaaaaaaaatctttagaggaatactctagttataagaatatttcatctttaggccagtgttgtcaaatggaaagaaaatacaagctatgtatatacttttaacttttctagtaatattttaatatacttttaacttttctagtaatatttttaaaaattgagaaattttacatataaattgtttgaaatccagtatatattttacactgaaagcacgtgtcaattcaggtgctaaattttcattggaaatacttgatctgtatttagatatgataaaatttacatttgaaaaagtagattcatatactcaagttgctccagacctacttacaagttttccagtaatggataagaataaatttttagaatttaagttaattaaaattaaatgaaaatacagttcctcagtcacactagccacatttaaaggactcgttaagtcacatgtggctagtggccactttattggaccaacctaagactttgtgagttggcctacttaatttgtaatgggaagttggtgtgtgtaccaactaaattctctgcatttctgcacatgtccaagaaacgatgctgagatagcatatgaatttctttataggacttaagatgttttatgaaactagactattgagctcttttaagatggggatcgtacattccagtagcaagataccactctcatagtaggcccacatagatgttactgaatgaacatgaatgagtgaatgggagagggtattcttaattatgacaaaggacaggttcccatggaggtggagtcctttaatttttataccttctattcccacataccttttttaatgtaatggaaattgggttttaagtattgaattaattgaatagtacctcccctttgtatactgcatgataatttactttgagtcttacaagtaaaaatccttcaagatagttaaggcagttattagagtaatacctttaaagtgattgtggcatattgaaagtcctcaataaatgccagtttcctttctttccttaaaaatgaaaccgtggaatttcatgctcattgaggcatcctgaaccatagaaaagcgctcaaaagcctaacaaatgaaagagcaagaagtggccgggcgtggtggctcacgcctgttatcccagcacttcgggaggccaaggtgggtgggtcgcttgaggtcgggagttcgaaaccagcctgaccaatgtgctgaaaccccctcctctgctaaaaatacaaaattagccgggtgtggtggctcatgcctgtaatcccagctacttgggaggctgaggcaggagaatcacttggacttgggaggtgcaggtggcagtgagccaagatcccaccattgcactccagcctggacaacaagagcgaaattccatctcaaaaaaaaaaaaaaaaaaaagcaagaagtaatgctgtcttacattaacttataagtatttaccttatctcattcaacccttatagcagttcattgagatagatattatttgtgttaaactgtactgccacattaaaagcatgtgctcagtgtctggctgctgggtttttttaaatcttgactctgccacttgcactaactgtatgacctttggtaagttcctgacacattctgtgcctcaatttcaccattcttccaagtgggaataataatagtacctaccaccacaacagtatgaatgatgcatgtaactagtttaaagcagtggcacaggccaggtgtggaggctcatgcctgtaatcctagcacattgggaggccaaagcaggcagatcgcttgagcttacgagttcgagaccggcctgagcaacatgacaaaacccagtctctacataaaataccaaaaaaaaaaggaaagctaggtgtggcagcgcatgcctgtggtcccagctacttgggaggctgaggtgagaggattgcttgagcccaggagcttcaggctgcagtgaaccaaggttgcaccactgcacctcagcctggacgacagagcaagaccctgatccccccaaaaaaagcagtggcaggtagtaaagtgcttatcagtttatcagtgttagctaaaataaatggtggcaagcttagatctaattaggtaaatagtcttttgttattacttgctatccaagtggaagaagccagaatcatttatttaactcattaaaaagggattcctgcctgactaatcaaaaggcagtttatccttcaagggccagctctaggaagacctgcctgacatgacacctcccttttgtcatcatgtctcatacagaatcactcatttcctgggctgtcaatgcatggagagcttgctgctggtgcagcattaatcatatataggattctttcttatatctgttatctctacccaactggatatatctttagaatagttcaaagttttgttcatctttatatcctgtattcatctttatattctgatgacaccagtgtgtgcctcagtagttgtagagcaaatgaaaagagttggaggagtgcattagaatgtgtttcaatagttttattctttctttaatattattttacttggaatcattgtatataatcaactttttaatttgaattttcaagtgacttgattcttgatgtaaaaatatcattttacactcttagttatatttttcctggagtaattaatggagaactagacagttttgcattgccctcaatgtttagaataacaatcatttattcaacaaatatttgagagatttttgtatgtcaagaactggtccaagcactagggaaacaagttctttcctcatggaagttgcaatctgatatggaggaagagacaaaaaagacaagatcatttcagctggtgataagtagtatgaagaaaataaggtaatcaatagggagtactaaggccaggcgtggtgactcatgcttgtaatccagcactttgtgaggctgaggtgggtggatcacctgaggtcaggagtttgagaccagcctggccaacatggtgaaaccctgtctctactaaaaatacaaaaattatccaggtgtgatggcacgcgcctgtaatcccagctactctgggaggctgaggcaggagaatcacttgaacccgggaggcggaggttgcagtgagccgagatcgtgccattgcactccagcctgggggacaagagtgaaactccgtctcaaaaaaaaaaaaaaatgggaagtactggaagagttgggctactttagctagaatttagagaaggcctcttttgaggtaggacttacatggcaataaagagctagctatgtgaagagcatttagggcagaaggaactcttaagtagaagggcctgtagaagagaatgagcttgacatttgccagggacagaaaaaaggcttgtgtggttagcattcagtcaacaagggggaaataagtagaaaatagattataggcaagaactagaccagaaagggccattaggtcaaaggtgaggaatttgaattttattctgatgacaccaggaagccattgggtgtgtgatggtggggaggtgttaagtagtgtagtggagcgagatatgatttatccctgtggttgatgtgtagagacatacaaatggggacaaagaccaattaagaaactattgctggctgtgtgtggtgacccatgcttgtaatcccaatgctttgggaggccgaggtgagaggatcacttgaggccaggagttaaagactaccctgggcaacatagagagaacccgtctctaccaaaaaataaaacataaataaccaggcatggtggcacgtacctgtagtcctagctacttaggaagctgaagcaggagattacttgaccccaggaggtcgaggctatggtgagccaagttcacgccattgccctccagcctgagtgacaaagcgagaccctgtccctaaacaaacaaacaacaacacaaccaactattgctttattcagatggtagatggtggtagcttgaattaagatttgttaataatgagaggtggtaagattggatatatattttgggggtagagctggaaggacttaatgataatttggatgtgtggcataagggaaagaagactatcaaagatggctcgtaaggcttagacctgatctaccagatatttgatggtgtcactatgcttgaggtcctataaaagaactaaaacaaaatagtttagcataaattgaggttcttagaattttgaggaataaaaaaattgattcaaaagttttataaatctttaaaataccataatttcatagttgattatataaaagtagtatatattcattgtagaacattaagaaaaatttagctgtaatgacagttccaaccaaagtattaacatttgggacattttcttttaagccatttaatatatattctcattttttcaagaagtaattattaactaccttctaggaacctggcactgttgttgtaggctctagagattcaataatatacaagaaaaagtccctgtctctatgaaatatacatttttttttttttttttttgagactgagtctcaccctgttgcccaggctggagtgcaatagcgtgatcttggctcactgcaacctccgcctcctaggttcaagcgattctcctgcctcagtcttctgactactgggattaacaggtgcgcgccaccacgcctcgctaattttttatatctttagtagagatgggttttcaaccatgttggccaggctggtctcaaactcctgacctcatgatctgcctgcctcagcctcccaaagtgctgggattacaggtgtgaaccaccacacccggccccgaagtatacattctaatgggagagacagttaagaaataagtaaacaaataagataattgcagattttatacgtattatgatgaaaataagggaatgagagagtgactatctggagactgccaatatagatttttctcacacacttgagttaatctataaaggataaaactgtatttcccatttcccagtgtgacgtgagtgccaggataattcagttggggggagaatagtgttttcaacaaatggtgctggcacaattggatatccgcatgcaaaagaacgtatttggatccctgcttcatactgtatgttgtatttaacttaaaatggatcataaatctaaatgtgagcactaaagctatgaacttctagaacacataggtataaatctctgtgaacttgtgttaggcaatttttgttggtagttttcctggcctttctaggcaatgacaccaagagcacaagtgacaaaaatagataaattggacttcattgtattcaaaaatgttcatcaaagaacaccatcaaggaaatgaaaacacaacccacagaataggaaaagatgtttgcaaatcatatacctgacaaggagcttgtgtgtagaatatattaaaggacttacaactcaacaatcaaaaacccacttgtttgggcaaaggatttgaatagctgtttctctaaagatgtgcaaatgactaataagccaatggaaaaaaatgcagaacatcattagccattagggaaatgcagatcaaaaccgcaaatactgctttgtacctgctaagacagctataatgaaaagattattgtagcaaatgttggccaggctatgaagttggagcacccatacattgctggtgagaatgtaaaatggcgcagtaattttggaaaatagtttggcagtgcctgaaaaaattaaacttgggagctaccgtatgactcagcagtttactcctacctacatatccaagcaaaatgaaaatgtatgtccacacaaaaacttgtacacaaatgtgcatagcattattattcatagttgccaaaagtgataataacccagtgttcatcagttgatggatagatggataaatgtagtatatccatgcaagggaagggaatattatttggcaataaaaagaaatgaaatactgatacatgctacaacgtggatgaacattgaaaatatgctaagtgaaagaaaccagtcccaaaagatgacatattgtgtgattccatttatacaaaatgtccagaatacacagatccatagagacagaaagtacattagtggttagtaagggctggggtgggtgggagtgggaatgaggaatgactgctaatgggtttggagtttctttttttttttttttttttttttgagacaaggtctctgtcacccaggttggagtgcagtggcatgagcatagctcactgcagcctctaccacgctgactcaagtgatcctcccacctcagcctcctgaatagctggaactacaggcccataccaccatccctggcaattttaaaaagtttttttgtcaagatgaggtctcactattttgccgaggttggtcttgaactcctggactcaagtgatcttcctgcctcaacttcccaaagtgctgagattataggcatgagccattacacccagcccagggtttctttttgtggtgttcaaaatggtctaagattaggaagtggtggtgatggatgcacaactttgtgactatactgaaaacccactgaatttactacactttaaacgggtaaatttcatggtatatagaatatatctgtaaaaactacttaaattgtttaataatatcatgcatgtacatcaccctcatgttaaatttatttttataagaaatactctgtcatcttgtgcataaatcttgcatttcttcaaaagagagtcctaggtatgaaatcactgaatcaaaaaggtgtgtgtatttctaatataaaaaaatatgcttacctgcagggcacagtggctcacgcctgtaatccctgcactttgggaggctgaggcaggcggatcacctgaggttgggagttcgagaccagcctgaccaacatggagaaaccccatctctactaaaaatacaaaaaaattagccgggcgtgttggcgcatgcctgtaatcccagctactcgggaggctgaggcaggagagtcgcttgaacccaggaggcggaagttgcagtgagccgaggtcacgccattgcactccagcctgggcaacaagaacgaaactccgtctcaaaaaaaaaaaaaaaaggcttaccagagaaaacttagaaaatatagaaaactagagagaagataaaaatcagttatagcctcacttttagagataaaattgtggaacttctttttcttctgtactgtttttcataattgagattatactgtacatgtaactttatatccagcttcttcattcactgaaagtaagtcataagtatttcccacatgcttttcaaaacttggcataaacatgattttaacagctgcatcaggaactatcctgtggatatactatcatttactttgcagttctcctgtttttatttctttgggctgtctgtttttttagtattatgtagattattttcctagaataaattcctagaagtgaggttactgggttaaagggtcaatgggtatggattattataaggctctatgatataaatggccaaattgctttctaaaagatattaatgagtaataaatagggttgcctgtggtggaagacaaatctggaaaagtaggttggtttacacaataaagtgctttttatggtctgttaataaataaggactttatcttgtgggtgcttgggaattgttaaagacttaatcttgggagtgataggagattttgagagtaaatgagagggaatagatttgaaatacacattgaaggaggaattggcagggcttagaaaactaggtgtgactgggaaacaggtagattagttaaccagcaatatcaaatctgtttcatatttattgatttgctagttaaccatccagagagaactaagacagcttgttaaaccaaggagaaatttttcacatttagcttactgtttggttaatatgctgtttctcaaagagtagaatactgaaagtattattcaccttgaaataaaaattatatatctaatttagtataatttacataaagtgaaattcaccctttctgctgtaagttctggaagttttgacacatatatatgtacacacacatatatacacacacacacatatatatacatacacatatatagttgtgtaactacagccacagtcaaaatatagaataattccttcacacacaaaaaattcctcattaatccctcctcctatccccaacaaccactgatctgttttttgtctctatagttttacctttgccatgtaaatggaactgtacattgatacactttgagtctagcttcttttcactcagcataaagcatttgtgcctcagcagttctattttattgctgaattttattccattccccagtggagaggtatattttattttattatttatttatgtatttatttttctgggttaaggagcagaaagtttaatagacaaaaaagaagagagagagagagaaagcttccttatgctgagaaaacaggtcgcccgagagagggtctccctggagagatatattttaattttttcttgtctcagttaaggatggggcagaatattagaatgattttttcctctttctaatgctcataaatccttgaaacagtcattttctctaccttagataaaactaatagaacttactattgcacacttgatagactacaacctttatatgcacagggaaaccaaaaaatttgtgtgacttgctttattgctatggtctagaattgaacttgcagcgtctccaaggtatgcctgtatatactaggaaaagggacatattttaggacaaaaccaatggcttgcctcataggacccagtttcatcattgcagattttgatttatagctgcaggtgatggttgtgcctaggagaatggtaggaggtattgtaattgaatcttactgtgttgagagaactattcccttctctttgctgttgatatggctttgctgtttaaccacttaatagtcatgtggagaaagaagagatgcacattaaattcttaggtttgtttttaattcgtagttttgattatcagagaacaaatggaaattactgtttcaaatcagtcttaagctgtttggtttctttatccataacattctgttacccaaagatttcaataaaaattggctgcattgttaactagaaagagtcgaagaagctctaactagattttctggttaatgtaagagtctttgcttagtgcatggaaggccttatgtgtgttgttttaatcagtccttttgagttagcagtatgataattcacattttacagatgatgaagctgaggattaaagaagttagctgacttgcccaagttacaggattttagtaagtctgattcaaccctgtggtacactttctcctctggttaaaaaggtcttcaaaggttaaatgttccaaattctgtttttgagaataacacagccagtttaaaaatatatatatattcagtatttgacttgctcaattttcccagttaattgtaaaatcagaaatagccctgtgtgtagtattgttacatacaatgaagttatctttattgctgttacataaaccttatattttaaatccattatttcacttcttccccaataactaggcttttgtttctcaaggaataaaaaaaaaaaaaaaaaattcttgttatggcatctgtaagaattaaggtctttgcttaaagtcaagtccttattatttttttgagacagggtcttgctctgttgcccaggctggagtgcagtggtgtgatcttggctcactgcattctccacctcctgggcccaagtgatcctccctcatcacctgagtagctgggactacaggcatgtgccaccacacctggttaagtcaggccctcttgtatgaaactttatgatgatccttcattttggttgttttgactctttccaaattaacactcggaataggtactttaaaaaaaaagagtttatctgaatttctcccaagatttcttccttgccctcagaaatagttaaccatagttaattgtagtaaactagaattgaagtctttacccttggaggcattattcttttttttttctttttttctctttgagtgactttgatattagaggcattagtctgtcattgtgtacatgataactgagtttcctgatgacagcaggcatcaatcaagctaaataatatattgttttctgaggcagaaaactatgaaatatggtcaataaatttgtttactccagacatactactttggtattaacagagttaattttatgtgttactttatatcaaactatttaaaatttaaaatttcttcagctttattagccacacatcaagtattcagtagccacacttggtagtgattaccatattagacagtgcagaaaagggacatcttcaccttatgtaaaatgctgatttactgagcacgagaccagtacataatgtactgttccctacttgctttttttctcttgcacagtgtatgaccataccctccttctttcccctccaggcacgtttcccctttaaatattgaagacctcaaaatcatctttgcagaaaggcataggccacagactgtttccgtgcttctgggttcttttcttctaggcatgtcctaaaccttggcaaaataaatttctaacttgattgagacctcaggtacttttggtttacagaattcacctatgtcctggaatcccctgtttgagttatcccacctttccagacttaaccaatgtacactttacctctattgattgatgcctgcttgtaacttctgccccacctaaaatgtgtaaaatcagtctgtcacacaaccaccttgggcacatgttctcaggaccgcctaaggctatgtcatcagcatgtccttaaccttggcaaaataaactctaaattgaggggaataaaaaggaacatttggctgggcacggttgctcacgcctgtaatcccagcactttgggaggccgaggcgggcggatcacaaggtcaggagatcgagaccatcctggctaacatggtgaaaccccgtctctactaaaaatacaaaaaaaaattagccgggtatggtggcgggcgcctgtagtcccagctacttgggaggctgaggcaggagaatggcgtgaacccaggaggcagagcttgcagtgagctgagattgcgccactgcactccagcctgggcaacagagcgagactctgtctcaaaaagaaggaacctttgtatcatcacagaaagttctgttggacagcacggctctctagaacagtgggacaaaggatttagtaaggcatgacttcaagatggtggtggtggtggggagagtgtttcagcactcatttacatatggtcacctgtatcctctgactactccagaactactgtttaccttctccagagaataaactccagaattccaggggtaaggggctggcagcaggatggcgttcaggagggagtctagggatctttgcttctcagacccatttcactcattcttccttatttgaacttccatatttcttctcttcttgtcgtggtggacttatgttctttttctttttaatcccatttttatactttaagtagagttttggtagggagatgtatatattcaacccctaaccctccctccccctactttttttttttgaggcagtcttgctgtgtcgcccaggctggagtgcagtggtgtgatctctgctcactgcaaccttcgcctcccaggttcaagtgattctcctgcctcagcctcttgagtagctgggattacaggcacacaccaccatgcctggctaatttttgtatttttagtagacacggggtttcaccatgttaaccaggctgctctgctgacctcaggtgatctgcctatctcaggctcccaaaattttgggattacaggcgtgagccgcagcgcccagccaagttccgcatcttaatataggacctgtgaggccctgaacacttctgtgaagcagaaatgtgctgaagaacttgtcactctcattttatttattgtctcagcatgattgttcagaagcatcaattatagcagccaaaagcccaaatattttgtcattagtcattctgtttctattggcccttgtgcaaggcatggtataaataaagtagaatcgtgaacccagtttttaactccctaactcctttgagaagttggtagaagtaggtagattaagatgctgatgacatttttgccagtttgaaaatttgctattgaaaatttgagtatttgtctgcagtatcctacattcaaatatttcagactttaccttagaaaaaaattttttaattaataattttctgaggtagttaaaatagctttcatcctgttttctctattaataataaggatcatgtgaagtttagttgtcattaattatgtagccaaggtcaggtgtctgtcttgagtttagtagtacggaaaaagaccaccgtttctgatttattttggtttaggagggactgctgtaagctatcattgcatttagcttttggactggttcagttatttacaaaaatcaaattagaaaaatttaatgctcacgtttcaaaggttactatccttatgctagaattgagagaattgttattttaagttgtgttctgtcctttgcaactgtaaaatacccagtgttccatattctttgtaacatttacttccctctgtgagtgagtagtaacatttttaaagaagcttacacagtgattcttaagtatgcatgcagggcctcagatgtattgatttaatctctgaaacattatttcacaaaagctgtgccagaggagactcagacaggtttgagaacaagttaaaaactggtagtcaagcgagataaaatgcagtgaagtatatttttaacagctattttttgacatgggggtggagctctaagagcaactgttctccagtggtcactggtacatggagaaactgaagttgtggataacatatctttttaaggtaatcacaaagctcttgttatgatagcagtctatttttgctctcaagattttccttcccatttgtgcagcaaacttggtgctatgttcagagtatcctttaatggtctttattgttaaaactgtgtacttgaatatcagtaactcttagaaaattttttaagtaaaaacaatttgattttgcttttttaaaaataaagtttaggtttcttgacaaatgagcaattaaatctaataacctaacattttagagaaatactagggctgggcatggtggctcacacctgtaatcccagcactttgggaagctgaggcaggaggatcacttgaggccaggagttcgagaccagcctgggcaacataacaagaccctgtttctacaaaaaagttaaaaaattagccaggtgtggtggtgtttgcctgtagtcccagctactctggatgctgaggtaagaggatcgcttgagcccgggagattgaggctgcagtgagccatgattgtgcctctgcactccagctagggcaacagagcaagaccctgtcccccttcccccccagaaaaaccacggaaatactgaaagaatgggactgatgggaaaggctcttttaggtaaaaagataataaatatctgtaaaacagataattctgtatattggtgttacagccacttttgttttaatattcaccatgatgttgttttgtgataacaaatcatccaaaattaatacaagaactctcaactattattatagataaactattatttagtataattgggtttttttttttttgggcaatcctgtatattttattttatttgaaacactatttccagaaagggcccataggctttgccaggagtccgtggcacacacaaaaaatgctttgactttggacctactaatattggtaaaataaagtactcttaccactactgcttcattataaaaattttgcctgtaggcaaagaagcccctatagcaatgagctacgattttattctctttcatgaaatttcagagcaatcttagtgatcatcacctgaagcttagtgtaaatacaaactctcagactctaccccagatattctgaatcagaatctttaaaatctgcaggtgattcctgtgcacattagagttagataataactgatctagtccactcccctaagtacagttaaaggaacaaatttaattcagagataatgacttgcctaaggtgacatagctagttagtagaggaatggggatggattgttactctcatgattttagtgctttaagatatctccttttggtctctgagatgttaataaattgcagttactttaatcattgtcttctttccatctgctaatctttaccccagattttcagttcacccactagaggcaaagacgtaagagagctaccagcgtattgagaggagatacacaggcactacgagaatggagtttagaagaaggtcagagccctgggcagtgttgggccaggctttagggttagtattccgtgctttctgtctgcctcatggttttagttttactgtataaaaatcattatcaagaacctagggactacagccaggcatggtggctcatgcctgtaatcccagcattttgggaggccaaggcaggcagatgacttgagcccaggagttcgagaccagtctgggcaacatggcaaaaccccatctttataaaaaaatacaaaaattagctgggtgtggtggcatgcacctctagtcccagctactcaggaggctgaggtgggaggatcgcttgagcccaggaggtcagggctcctgcagtgagccatgatcacatcactgcactccagcctggatgacacagagagaccttgtctcaaaaaaaaaaaaaaaaaaatctcggaaccggttatttaatctttatttcttttatctcggttttaatattcaccatatctcaaggatgtggtaagtaaaccatggtataataaatttaagtatattcattaaatctaacatatactataccttgtgggttttttattatttttgcaggcaaaatttagtatatagtgttactagtcatgaagagccatactactagttactagtcatgaagagccatactactctaatatcaaagccaccacagtggggaaattaaggaaagtgagcatttggcattattaattagcctcctgatcaccatacagactccttcctttccacctcccctctcccagtccagtgattgtcaactacaattgattgcacctatgcagttcccatcacttcctccttagtaatgctgccactaccctagtgaaggccttttgcacctcttgccttggttgctgaattagccttttagctggagtgcctactataattttcttcctcttcttgttctcttacgcatggcttcatgtattttcccaaagcacaactctgttcctcttactctttttaaaaatatccagtctccaaacccctgaaccttctgttggaggccttttccatctcaacctggtgcgagtctccagtttccttctcccttatcctcatctcctgttgtatttgctgggttctctttgtcaggagcagtcttttcatcctttcagtccccttgttttagagtgcttttaagtcagcatgaaactacctgatgaactgtctttctgtttaagctactttctttaaattcccttccactggagtttatcaaggaataatgtatattctaccaagtattgaagctttgtatgtgctgtccttatcttctccataagtcaaactaatgattcatctgactgatctttgatttttttttcagggtaacacaataatgaataagacagacaccgtttatcttaaggaacttacagtctttaagaacttgtggccttaaggagatgatattaagtaattttaaagatagagcattgaagtggtaggaggtggtgtgtggtggagatacatgatcttatgggagcatgtgatactggttttgatgcagaagacttttctgcgtagtgagaattgatctgacatctaaagagtattagccaaagaactgtagggaagtgctatctaggcagggtgtatagtatgagcaaaggccctgaagtgggccagagtatggcaagtacaaatgactgaaagaaagccagggtagtgaaattgcagtgtgtggtctataagataaggctaaagaggtaggtatagccaaatggagcccattattgggctgggggtggtggctcatacctgtagtctcagcactttgggaggccaaggcaggacaatagcttgaggccagaagtttgagaccagcttggacaacatagtgggaccttgtctctacaaaaaaaattttaaaaattagctgggcatggtggcacgtgcttatagtcccagtactcaggaagctgaggtgggaggatcacttgagcccaggagtgcgaggctgcagtttgctatgatcatgccactgcagtccagcctgggtgacgaagtgacaccgtatctcaaaaataaataaataaataaataaataaataaataaatagctattttttaccttcagatcaatggaaagccactggactgttctaagtatggtgatcagattcatgtttatgtagaggatgaattggagggtaaaggtgatgggcagttggtatgggcagtcttgttgtattagaactgcaataacaaattaaattcaaaatctcagtgacttaacacagtaaagatttgtctctgtcacgcagagtccagaagggttgggcagccttctcctatcatgaagtatgcttaccaaggtcatcttggtgggagaaaacagagctttaagatcacttttatttaacttttatttaatttttgatgttttaaaaatcattttattgtggtaggattcacatctaaaaagctgtatttagtgtatttaaagatcacttttaaagggccaggactggaagtagtttacataactgggcccagcttggctgttcagaactcaaatggctgttcagaactcagtcatacagccaactcagcttgccaggaaggctggggaatgcagtctttcctgttcagccaagaagagaaaacagtatgatgtatacatatcctaatctccctcctctgcagccacttgaggagttactgcagtccaagtaagaggcaatggaagcttggactgagggtgaaatgagatgaatgtatcagagaaagatgaaaatccaaagagtaagataatggaggagttgctaagaacatctcttaggcttggagccttatgtgactaggagggtggtgatagctactgagaaaggaagactggttagaaatggaccagcttgttttttattttagacatgttgtgcatcacatgcctttgagacacacaactggagatgtgagataggaagttgaatgtaaagactagaagctcagaagagcagaagtctgaactaagttttggcttagatgattgaaagcttgagcttgggtaaactctctgaggaagaatgcagagttcgtcctttccttccacactgccatcagcctctgctttccactgcattgtcctaccaccctcaccccttgacctcagctgaccttttggaggtccccagagccctttttcttgtccttaggtagttccttttggaactccccgtcatagctgttctgaattgttagtagtagtagattggaggagtgccctcaaacccatcctactcctcctgccttatacttcacagagaaaatagaatctttcagacacaatttttggcagtgtatcttccttccacctcaaaactgtcattttcccttcctccctgtttcagagaaaaaaatgtgtatctttttcttaggctaactctcccatctgtgctgtggatcttacccatttctttagatctctgatattgttaattttatgagtgattaagattatctcctctggaattgcttgaacccaggaggcagaggttgcagtgagccgagatggtgccattgcactccagcctggatgacaagagcgaacgtccatctggaaaaaaaaaaaaaatctcctctggagccaaattgccagagttcaaatcccaattcctctattgtttactctgtgaccctgggcaaattatttaattttgctatgcatctttaagatgcaaatagtgatagtagctgtctcatagaattgttgtgatttagaagtgtctagcaatagtaagtactcagtgtatgttttaatttttttttaatgttttggctcttcctctttattccttcaagttcttaaatatctagaacagttacatctccccaatcataagacaacttgcatgaagtaccattcaatcttcccttttttcttcattgttaaccatcttatgttttctgtctttacctcttcaattccccatgggtccccagtccattatggttgacttctgtcccatttctcccatctgttgaaatgttcagaggcccaattgccaagcccagcgatctgttttcattctctgaaatactgcagaattggctgttgatgactttcctcctcaaaatattctcccttgcttctaagatgctgctttcttccttctttttcttcttagttttctgattacctctttttagtgtccttgatgggtttctctttttaatttttacgtactcagtggtgagaaactagattggtttttcttttgctgcttaatgttggtgaccccatggtgtgggctagtccaaaatatggattaggtgaagccttccaacgagatccgtgctcatatttctgccactgtctggtcatctccacctagatgtcttgcacagtcttcagagtggatgtgtcgtactgtgccatatttccttttctgttcatatattgcagtctagtcactaatcgagagaatcctggggcttctctgataccactcttttgtgtctcattcagctatattggtttgactttgacatgtccttgaatttttctgtttttaacctcactgctgtagttcagagctttcttctctgaatatttgtaattgtgtcaaaattggttttctgcttccagtttctgtgccagtttctccttcaagtattcagtgttaatttcctcaagcacaagtgtctaatggtataagaaacctccacagacatcacttctgatagaaaaaaagacaaaattcttccttactgaggcttttaaggagcttgtaagttacagccagatttggctgagatttatctgttttataattgcagaatgcacatttactttgtttttgattactagtacatcattgatttaatttacaaatcagaatttagaatgtttgagatgcttagatattgattgatgtatttaaagattggttgattgaatataaggctttagatgttgccttcctgcttttagaaattgcttgttgggtcaaatgtgacttcaacattatggactagggagttagagggattgggatctgtttctagttcttcaatttttgttgctttgaacattttattcatctgttgcaaaatggagattcttaacttgcttaacataagatacgttgtaaagatcagaaatatgctactcctaaagcagtaaaaggtttaagaaaagtgctttttaaaattaggaatgtggtaatattgtgtacttatgagttttctagtcctaattttctgtttctgccactttattagagtgaatgttcatttatgaacagaaaatgtggagtagatggcattggagtgtgttatttagagatctttaatgaatgagatgatgaaatagcccagttaccttaatattaagtaaatgctaggatcttagtgtatctttctcccaggattcttgcatgtgttttaaagtgacaactttatttttatttgtttgtataaatgtatgggggtacaagtgtaattttgctacatgcatggatggtagcagtgaagccagatcttttagggtatccatcacccgaataacatacattctacccattaattaattcctcatcctcccctggctctccattgtcttttatttcacactgtgtccaggtgtacacattatttagttcctaagtgcgaacacatggtatttgttgtaataactttattgaggtataattcacataccacaaagtacagttcaattcagtggtttttcagtatattcacagttgtgtatgcatcactcctgtcaacttccagaacattttcattacttcagaaaggaacccatactcattagcagtcactccccattccccttttttctcaacctctggaaaccactaatctacctactgtctgttgattttacccaatttgaacattgcatataaatagaatcatgcaataggtgcccttttctgtctggcttctttcacttagcacagtgtttgtcaaggttcatccttgtagcatgtatcagtacctcatttttttaatggccaagaaatattccattgtgtggatatactacatcttaaaaatctattcatcactaaatggactttaggattgttttcacttttggtctattttgaataatgttactatgaacatttgtgtacaggtgttggtatggacacattttcatttctcttgagtatatatacctaagagtggaattcctaggtcaggtgttaactttatgtttaactttttgaggaactgccaaactgtttgccaaagcagctgtacccttttacagttctacagtagcatatcagggttccaagttctccatggccccacaaacatttgttattgtccatcttttttattttagccctcctagtgggtgactcattatggttttgaagtgaagaggtatctcattatggttttgatttgcttttccctaatcactattgatgttgagcattttttccacgtccttattaaccatttatacatctttggagaactgtctatttaaatcctttaaaactgttttttaattgaagtatttgcctttttttataattgagttgtaagggttctttattctgacaagttccttgtaggatttttggatgttttctctcattctgttggttatcttcatcttatatgcatttttatttcttaaatgatttgacatttgggtatcattaatatttttccattgtttagtatttaaattctattgcttatgattcatttttccctttttattaaaaaaattttagaggcacggtctccctatgttgcccacactggtctcaaacgcctgaactcaagtgatcttcctgccctctccctctaaagtgctgagactacaggcatagctactacccagcctaaagataccattcttgactcaaagcatggttttacataaattgaccatatgacccaacaattccactcctagttttctacccaagagaattaaaaacatgcccacacaaaaccttgtacacgagtgtttatagcagtgttaatagtcaaaaagtggaaacaacccaaatgtctatcaactgatgaatagataaggaaaatgtgggatatccaaacaatggaacattattcaacagtaaaaagaatgaagtaaccagccgctttgtcatgcacctgcagccctggctatctgggaggccaaggcaggaggactgcccaattttaggagttcaaggctgtagtgtgctatgatcattcctgttaatagccactaggctgcagcctgggcaacataacgagaccccatctctcatgcaccccatcctgcatcatggctgaacattccagatacttcacagctcccacctgcttagccagggaagggccttgctgaggagtcattggcacttggctctgctccttcagcttcttcactgtctcatggtcactccacaggtcccttttggtgcctaccagcataacagatacattgaggcaatgatgggagacctctgggtaccacttatgcctcacattggcctaagaggatgagttgccaatggaaaaacaaatgacagagatattggtcttggggataggagaacagtcgcagttggtcatattcctcctcttggccagtggtgtcccacaggttcaggctgatgatttggccatccacagatgtctgggtgctgtagttgtcaaagacattgggcatatactccttaggaaaggcatttgttgtataactgatggggaggcaggctttgtctacagccacatctcctgcaatcacacatttgattgtctacattcttcccttagtctgatcatcctccagtgctgttcaaccatgactggcagagcctcctgggcatctcttgttgggctttataattcttgctttagaaaagctaacatgcaaaacaaagtagttaatgaggcattaacaattatggatataataaagttaatgtaaatagcacattcctcaagatgaaaaaattaaaaactggtttaagatcttgtgctatcaagattttgtttaactgtccttcagcccagaatagcaagtataacatagcgaaaggtaatttttctggtcagtataatccctaattaagctaccctctttattatagcagtagacattttcttatttattctaatcttagtttaaaatttggaatttttaagtgaaattttaatggcaagtgtgactaatactgaatattgatcacataattttgaaatgtgagtagagcaaagacctcttaataaatctttttttttattagagaaagagatgctgtagggatggaaatttcccagtctagcagctatgaccagctactgtgtattacaaaaggaattttaggtatcatgaatatacacactgggaagatgatctgcctgtagtcaaggctctaagcaacctgtataagaagaaaataacccagcaccttaggaaacacttcttttaaggttctagggtaggagaggctgctatagttgaatgtttccttacccctgtgcagtagtgaggaatggcatatatttgtgatcttttaaaaagtttgatgtctaaaattagtagtgattacagctcaaatttctagttttttaattagatgatatacctttaaaatgttaaatatatgccaatctataagcagaatttattattttatgtttggcacaataaaaattgtaagtctttttctcatgtattttctcatcataggcctcaggagtgcaagtagctgatgaagtatgtcgcattttttatgacatgaaagttcgtaaatgctccacaccagaagaaatcaagaaaagaaagaaggctgtcattttttgtctcagtgcagacaaaaagtgcatcattgtagaagaaggcaaagagatcttggttggagatgttggtgtaaccataactgatcctttcaagcattttgtgggaatgcttcctgaaaaagattgtcgctatgctttgtatgatgcaagctttgaaacaaaagaatccagaaaagaagagttgatgttttttttgtggtaagcatgttagaaatattgagcctctgtaaaactcattttgttagcactcgggaagaccagttccagcaccaaagtaatttttattcaaactatttgcagttgttgtcatttaatttttatttacaggtttcataatgttaccagggctgatgtttatgggacccaaactaaattttgactattttctatctacttgttatgtgactctccgtttttgttttttttttcaatggggaaaggacaggaggcatcctctgaatgtactgcttttataggctaaaatttcctactacttttaactttcttacttataagccaaaaccctacttttccaacgagccatgccaggaaccagccttctatctactcttttaaattacaccccttccttgtgcctctgtggtctactacttttgaagaaattggtaccattccctccctgctataatttgctctacagttgcactgtttagtagtgtagtcactagccacatgtggctatttaaattatttaaaattaaaaattcagtttgttagctgaatgaattaccacatttcaaatgctcagtagccacatctgactagtggccaccttattgagtagcacagatacagaacatttccatcattgcagaaaactctgttgggcagtgttactcttagatagtgaaacagggctataaagttatttttatggcctttttcttgaaatgttgtttagttattctggtcttttcaggcaagtcggtatttgagatgaagctttagaaaaaagttacacctggatccctcatttattgaatattatactgcattccttgatatggccaggagtagaattctttagtttctaaggggagggagaaatggtaacactacctgatttttttcttttttttttttttagaggggcaaggattctcttgatactttggcctgagtcagggcaaggcagggagggacttagcttttagctatgtgccatcaatagcttggagtgtaaaagggatatgggagtaggagatgcagaggattgtggtttaaaaaggaagataactcgaggtcacacctcacttgtatttcagtaagcttttactgcacttgattaaaccaagttgctgtgaggaatgcaaatatgaggtcagggtgcacgtattcaggcagcttagagtccattgaagctggtacataagactgaaaattaacaaggatttgaatgaaggtgcatttactgaactttatttctactacacgccagctattgtgcgagggcctgggaaaacagctgtgaataaaacaggttaagtccttcctcttctggcattcacagctgagtggcagacaggccagctaatggtttaggcttttaaattggtcggtatttccttaatttgcaggtattttttctgctttttatgtattttgtaattatgaaaagtatgcattcttatttttttaaatgtggaaaataatagaagaaaaggaaatttagtgttagtgcagtggtttattttgcactgttacactgttacttaagaaaaggtagaaccttattaaaggcattttctataacaagctccgcccatggcccagggagcagctcttaaagtagtttaacaatttggttagaataaaagcagaacagctgatgcttttttatgtttctgacctattttcataacaaaagtacccactctgctgggcgcagtgactcatgcctgtaatctcagcactttgggaggtggaggtgggcagatcacgaggtcaagagatcgagaccatcctggccaaccaacatggtgcaaccccatctctactaaaattaactgggcatagtggcacacgcctgcagttccagctactcgggaggctgaggcaggagaatcgcttgaatctgggaggcagaggttgcagtgagctgagatcacgccactgcactccagcctgggtgacagagcgagactccgcctcaaaaaaataaaaaataaaaagtacccaccctgtagctcaaacatctgccagtcctgaggttgtgatggctctgcctccttccctggaccttaggattgggaggaataagcctctgagagacagactgccctttttcccaagaatggaatctctgctcactagggtaaggggtacactaggtgaggtccacatgccagtgctcatggctgttgaatgtcctggaaatatggcagctaaatggaattattaaatgctcagaagtatttagctataccgtaatatcttaatgacctccagtaggctcttggaaactacagctttaagcaaaacaacatacaccaggtcctcaaataacgtcatttctttcaatgtagttttgttataacattgagaaaaaaaaatactggttttggtatatgtcattttgttttaagtcacaggctccaagaactgattgacaatgttaagtgtggacttactgtactgcatcttctctgtgatattttagcagtgtggcatggaggtgggcctatgggttggcgtacagaggaaagaaggacctccgtgcaagcagtctgagtgggagggtttctgtccgttactaatcatccttattcttcagtgttgctgctgaaggtgctgtgacacatatgctgtgcttctaacacgcttcccttcaagagggagaacgtgctccaatgttataaatataaaaagatagtaataatattgacagttaagacataattattggtgagttgccatttagaaatctttagaatcatgagattatacaagtggatttaatatttttttccagagaattattgaaacgtggatgcccagatctgtaattaaacatgtattgttatgttagactaagaaaacaagtacctgtgggatcaaaacctgctattggaatagatgaagggactggggaagtctaagaaaaggacttttatttgtaatttattcttttttgtccttttttttaagtttttgatttattcttttttagaaaacaatctgaagcaaaggtgccaaaatattagcatttaattctgggtcacacgtacttacggattattctctgtacttttatgtattttaaaacttttttccaactagaaaaactgtcaaaaaccttgtgtaaatattagcctgaatccaatcccttattaataataatgaaaaatattctgaagaaaaagaattgggttatacagtgaagtactcagtgttggttctttcattatggcgactgtaatctgatttttaattggtgattgtcttttgccaccagtggttctcttcttttttcccaccctggtcaacctgagtgattctgcatatgcctatctgtagcatttcctctctgagctgctggggaggtagaaaaaatgtgcagttaagaaaaaatatctcaggagagtctgaggattctcagcaaatgtttacacaagcaaatgtttaacaagttgcaagttatactttctctaaaccacttttttcatttttggcatctttctatctagggcaccagaactagcacctctgaaaagtaaaatgatctatgcaagctccaaggatgcaattaaaaagaaatttcaaggtatgttctagatgacctctgaatatgtagaggtatggtgaacactcagaatggggcagcaccttttctgagaagcaccttatttttttgcagagcttcgggcacaagggagaagtgttacttgttttgagaaaagcagaagactgaatttgactttccatgtatcttctgctttgtgctggttgctctgggtctgcccagcctgtgtttaataactatacccttgacattgtctatatatatcgtttattcaggctggttttaaactagtttgaggtgctaccagttttctcatgtaggaggtggagactgattgtttaacattggacataatagtaaatttgctcttgcctttgaatgtagttgttataataaagttgcaaaaaggaaatgtacctaaatgagaaaggatgctcttttctccagctttactgttgaatggcatgattttaggtaattaattcatctgtgtcccaaggaaagtgcacccactcctgagctggtcagttgtatttgacttgccactgggtgattgggatcctgatgagatggcctggccagacttcagccaggagaaaatgttggtatgatggaaagaacgtgcatggggcaagtgcccaaaggcctgcactgagggcgaagcctgtctaactgctgtgtggccttggccagaactgcttaacctccatgggccttgattctctcagctgtagaaggggagacttggtctcatgtgtgagttttagtttaagagtttgccctgccaccttcctgccatggctgtttccaaacagctgagtgagccaaggtcacaagggcttggcctgatgttgattttgttttgtttgttttactgtcactggtttttatattttcatggtagaacaggtttgccctagcctgttttacttagttcggaaaaaaaaattcttgcttcctttcccgagccttgctgctgcatagtttattgctgggtcaggttcttcgtgcatttggtttgatgtttggcaacccccagaagtgtgtcactgggttgctaactgacacttttaaatcctttagcttcaacactttcccagcccaaccaaaaggttcacagtggattccttattatctttattctgcattgcctttcagtaaagggaattgctttgcacacttgatttggtgatactaaaagatagtggccggctgggtgtggtggctcatgcctgtaatcccagcactttgggaggctaagacaggtggatcacctgaggtcaggagttcgagaccagcctgaccaacatggtgaaaccctgtctctactaaaaatacaaaaaaaaaattagccgggcgtggtggcacatgcctgtaatcccagctacttgggaggctgaagcaggaagaatgcttgaacccaagaggcagaggttgcagtgagctgagatcgcaccattgcactccagccagggcaataagagcaaaactctgtctcaaaaaaaaaaaaaagatagtgaccatgctgccttttttctaatgaaagcatccactgtctttctcagatcagtcctgagtagttcaaaagctgacctgctgtgctttcagcagcttgagaaataatggtctttaaatgatgggaataaccatgcagctatttaaaagacagtggccatttacagagaagctactgtatgtaatccataattgagctcgtttttgcattgtggtagtgtaattgttctaagaaagcaatcagtaacatatttcacatagttttcattgtgatcgatttcataaatgtgtagtgtaataccattgaagagccagctgtttacttttcaatacagttgacaaaatcaactgtgcaatcaaaaatcatttgtatttttatgttttaaaaaccaagaaaattttcttactagacctgccttttagctttttagcaaagtacaacatatctttagaaaagtgtatgtcacaaattattgtagaatgtgttgaatttttcagagtgaacataatggttatttcttaatctaatgaccagcaccccagaagcctccctggtgctgttcccttcaattcatagcacttctgcctgccccttcctcctcaaagtagccagcaccctggcttctaacagcgtaagttagcgtgggctgattttgtatgctatacctatatatataatagaatatatgcattttaaatctggattctttcagtgaatgctgtttgtgaggcccatctatcttgatgcatgtagttacaattattttttctcgttactgtgtagtattccgtgtttgtatataccccagtttatccagattagaactggtcttttaaaagtttggttatcttagagaaagaggtaaactgctgccataattgtaaatagaagtgttgttttttctctctaggcataaaacatgaatgtcaagcaaatggaccagaagatctcaatcgggcttgtattgctgaaaagttaggtggatccttaattgtagcctttgaaggatgccctgtgtagattattcagtgccacaaattgaaagcttccatgtttaatgttatcctcttgctatataaataaagcaaatatatttaggccagggtctcactgagggggagctgtcttgtcatcttttagagtaaactattctataaacatatgcaaacagccctaaataaatctaaagtctaaagttttattgatgtgaaattaaattcttattggccaaatgcctgttttgatgagttgatttataaagatttttgttaagctcaggattttaaattacacagttcacaaacagtaaaggccatgtgaagagaattattacatctttattaacctcagcatttactttgtttcttttgcttaggaaattgctcataatctggttataattttggtccaaattctttattcttccttgagctaagcagaataatggaatataatatgtcttcataatataacaacactaatacactaatagtaagattaagttaggcagtcttctaccaaatgtgtaatggagattgcctcaaaattgtgtccacataatccacgctcatcttgcaaagcgctatttcaggcacatcattggaatacaggaagtagccctgcacctgccagtgagctcgccattcactgattggaagagtgacctggcatcttggaaatcattgtgtgtcttcaggagaatgtgcagtgtcttgtaacaactaattataatgcaaattagggctacattgtaatctgctttgttaatgaaaatgataaaacagaatattgacaagctaggacacctgtggtatctttaattgtatctccttcagaagtttgcttcttatggtataataaagtatggaagaatattgagtatatgtttactctgggcctgggagaacttaactttctagagcagtttgttgacttgtgtgcaatggggagaggtaccatgatgacactcacagggagccactgttcactgacacttggaagcggtcattgttaatatcacgggcgtaacactttgaacgatatagagatgcacaaacagttgaacttagaagtagcagtattggctttatgtaataaaggaagcatttttgacttacctctcgtgtaattttcatgtgtgaattgggaatacaggattttgccttccatatggggtaaggcattgaggtttgggtatttccaataattaagagttaaggttggctgagtgtggtggctcactcctgtaatcccagcattttgggaggccgaggcaagaggatagtttgaggccaggagtttgacaatcagcgtgggcaacatagtgggatctcatctactaaaaataaacaaaattagccgggtgtggtggtgcacgtcagtagtcccagctactttggatgctgaggtgggaggatcacttgagcccaggaggtgagctgagatcgtgccactgtactccagcctggatgacagagcaagaccttgtctcaaaaaaaaaaaaaaaagtcacaactccctctggtgaataagaaagttggtgtaaaagttgggaacgttttcaatgtttattacactataagtgtaataaatattatacaaaattataaattcacatttaaaatttagaaaatagagaaaagggaaattatacattgtcctaccacatgccatcacatggttagcattttgatacacagctgtgcattattacatgtcaaagactgcatatactatggtggtcccatacaattataatgtattttctactgtaattagatacacaaataccattgtgttacagttgccgacagtattcagtatagtaacgtgctgtccaggtttgtggtctaggagtaataggctctaccatacagcctaggtgtgtagtaggctatgccactaggtttaagtgcagtctagggtggggaacattttaatgttgatccacatgccaggtgtttgtgagacaagattatgctttaatcaaaatattttggaattgtctagaaaatagtgctggctgcttgtcattcatcctgaattgcttgtttctttactttgtagcaatgcttttagtgtgggttttgttttttgagacagggtctcactctttcccccaggctagagtgcagtggtgcaatcataactcactgcatccttgaactcttgggctccagcaagcctcctgccttggcctcctaaagtgctgtgattacaggtgtgagccactgtgtcctgctagtgattgtgattaacaggcctccagggaagtgccataagcccaagactgccgtactcaaaagtcagccatgtaggtaaagcaagatatttggtcaaggagttttagaaggagatttttcctgtggtgttggcttaagtgtggcactgttgtgcgtgtgtgaggtgtcttctgtgggaaggatttcaaacagtacaaagggatgtgatgtaagcatccagaactcactccagaaattgaataaaatgctagtagttagtctctaggggaacttttgagaaagtctcagtggattcctgaggcccaagaattgtgctaacaagcactcaaggcgattctggtacataattagggttcagacctcagctgattggtctactgttggtcaggaacaaaactgcaagtatactctgtttccagaaaatacgtttacctcttcacaaatgctaacacactgcaaaaatatgtttgtggaaagctgacttagtctcatctagcggttactctcttgccctgacaaagcagcaaataaagccattgctaacaattcaatcagagcttgactgtgaagttatctcagataatattactctgcaaaaacagtggacacagtgacttggataataggtttggtttggtggtttcctttctgcagagtaccggctgccgcaggcacagcaagtgcaacttgtttcttgactataattgcccttcggaccaccagagactgaatatgcccaacacgcatcacttcttcgtgatttggggcatttctgaaattgagaacgggctctagactgggttccagctggactgcagctggaagggacagtaatggcattatggctggtgaggggagtattccaggagccagggtttcagtggaaggcaggcttgagtaccgttttgttactgagggctctctgggttctgcacagtcccaaaagggcactggggaagggacttatggagcctctggccagtaccctcagtaaccagcccagaggtgaattaacttgcctaaggttaatcgactcacaagtggcagaactgggacaaaaactcagatctcttggtttctgttcctgagctatttccaccacctcaggagaattcacttcattcctcttattataattggatcatctttccacatttctaacatctgaaattcaaaggttagaccttgttcagtgctggggtgagatttgaaagggccaagaaggaaagcatttcttttgcactctgagctctcatcagacccagccctgaaggaagtgtagtgatggcatctgtggagggcgtggagtggcttctagaacaaaacctcgctttccccgcacctgtccctcaggcctcgctggcttcctgccttcactgcaccgcttccgtaggtgtggcctgcaggcgcagcatcgtggtgcctgtgtgttccagaatatcacatggagacacctgaggaagctggtcagggcgcagctgtctgtgaggggcttcaggtcttgttgtgctgtctatgggccatgttaacctggaacttcacatctactctgtgggctctgatccatcttcacccagcggcccaaacccagggtctggctttgtgaagctgggccagggaggagcagtggttcctctgtcgggcagcagctgggtgagtcctgcctccacggtgaacttcattccaagaacagcacaagccagtcctctggtgctgcctgagctcggctacagctgcaggacagggctgcgaatggccaggccagtgacctgtgccacgctggggaatgctgtggggctgggggggtgctgctagccccttccgcaggaagtttgcgagggctgcgcctcagctggcttccctggagcctgacatggaacctggcctgggacagttgaggaggcccggcccacctgaggcagggcccagccggtggcctggcagactcaggctccctctgcccacctgggaggtaccactgccgggcctgaggactgctctggccctgctggggcaggcggggacaacagatgatgggcccttagaacgagctgcaggagaaaagctcccaagtggcattttcctgaactcccaggccagccgcacaggagtcctacaccctgtgctacctgccttcggcttcctcccttctgcatgcacagacctggggctcccagcaggtggcctgaaggagcaggcttttagccagagtccaggaggaggccactgcccctcacaacccagaggcggcagcgtggcaccccagcatcccttgtctctttccccaaggtctcccctttccgctgctcaaaatgggtacccctgccccattcctgtgccttcagaggggatcagcccagcatggagcgctcagtctcgcagtgtggcaggtcgagggggcgattcggtggcagccctggcacaggtctgtccgttccccacactcaccggggcccacaccactgacctgacctacagccacccacgtgcagagttctgcctcctgcaggcggcctccctcacccagaacctgtgctcccactcagccccctgtaccagatgcatggggcgcggatgcagggggcccagtggctgttgcggggcgctcagcccagggtgttcttccccaggctccccacattgcagagcccagccctgccccacaagcactgacctcccaggctgcggggcctagccacgtgtcagagagatgggtttgaacctgcccagcctttagcccggggaggtaccttcacttccatggggcaggatgcacctcaccgggaggaccgagggctcgctgagcgccaggcacagggcgggaaacgggcagccatcaggtgtccttgtgggcacttcctgctactcagtctcccagccagaagccaggatgtcaatgtcccaagaccgtgggatccctttctgcttcagcctcctctagagaattctaaaacaggcaggcttggctctccctgctcagaaacctcagtggctgtactgcctccccagtccagggccccccagtcttggtaacctggctccacaacaggccgtgcctcaccccgccctccacgcctctacgctgctgctgcctgagtgccagcctccctcacctcacacacatctgctcttcctgggagctcagcttaagcccacttctccaggggccttcctaggactcccagcacccagaacagccatgacgcacagtgccacataccatagctgggtggcccacaggcacttcctgagaactgacataaggtctgggccgagcagtttgaggctaagcagttcaaggctgcaggcagaggccgtgtggggggctgaggaagggaggcacacagacgcacaccgcggggcttcccttggtcttgaggttgtgaaaaccatccgagtcactgccaccacctgaaggggccatgcacgacagagatcccagagcaggccacctgccaagctcataggcctgtggagaccccggttcttgctgccactgtccctgacagaacccttctcacaatgtcgtcctggaggacctgccatccaagagcccagttgtcccccagccaagttcggccaagcagaccctctcccaagattccgaggcttggcagggagattaaagtgaacagtccttggtcaaggcagacccgccttccattccgggcttggttggggccctactgtgactctgagcctctgaacgtctttgtggactaagctccaggttcctattgtttacactcaaagggacacacttcttggggccaaagaccatgctgtcaggggccgctgaggacactgggtctgagggtcgtggcaaacctaagctggtttctgcaggtgaaactccacctcccgagggcaggcagtgggctgctccagccctggcccaccctcctggggtgtgggtgtctaagccccagccaggacagagaccccttgttcattcccggacctccatcacgcaacagcccgggccaccagccgcgctcacaaacctcagcccctccgggatgcggggcagcagtaaatgtatctggctctcaggtgtcgcaggccctgctcccttatcctgcccggagggcactgaggtctgggaggtgacaaggaaaactgctgggggccccggaagcagcgagtctcagccccaccccacgctacgcggagctgcagagcctctgccttcaaagcagctgaggcccacgcttactctcttcccgagtgcgcccccaccccttggttcttcatcttgggcccaacagcgggtgggggagccccagcagaagaccagacgagaccgcagcaccgggcaccaacgttggttttaatggcatcaacacccaggaggtcacacgtcagttctggttggcaacgtctaggggtgaggggctgtggcctccagtcggccccacagcctttgagaactggctgcccggtcccacccgcttcccgccccgccccactgaaaaaacactaaacgattgcactgacagacagaccccagagcgcccggcctcccacacacccacggggctgtcagagtcaaccagggctttggcgtcactcggcggtggcccggggctgcgcccaggatagtgtttatcaaatgtgacacaggttcatttacaaactggggctctggaaggtctacttctgtggctctaagagacttgtctctcatggcttctctcggagctaccggaagttgggcctggataacgctgtgtaggttggttggtttatttgtaaggaatgtgtaaggcattttggtaagttgaacagtaacttctttttccaaagaggaaactcagacagaggtgccctcctttgagctgctgccgtcctcctgtgaacgaaggcaggtggcgtgaggggggctgggccacgagccatggcagaaccacctgccctctaccctgggcctttagtccctccctggattgaccccctcaagccactccagtccctcagagaacaggagccacagacccctggggctgggggacagggaggacttggtgggagctgaggggaaaccatcatcctgcagggcaggggctggagcactggctaaggggcccacacaggtgcaaagtgaggacctgggccagcagggggatcagacactcgcttcccagcaagggaaccccagaagggtgggtggtgggccgggtgggctgaagccctcgttaggaagtctctgtccccactacctccgcccagctctgcctcccctggggctcccagcccagcgctcccagcagcttgacgactccgcccagctctgcctctcccggtcctgcctccccggggctcccggcagctcgactcctcccgccctgctttggcgccaggcacgcactgccttttccagctgttcctgcagcttcttcaccgtgtccttctcccttgccagctgctcctgggtcgtcttcagaagctcctgcagtctcgtggcggcgcgccccaggtcacttgttaacttcttctctttttctagtctctcctgatggtcagaaggttgacgggcatcagcccttgcaccggcaggagggccaccccagctatgcccacaggaccctgacgccaggggctggagccctctggggacacaaggaaggcaactcctggtcacccggagataggtggtgacgacagggaggaaaccgcccatgctgaccgtgagggctgggtcctgtgctctcagcaccaccagaacttcctggggcaggagcagtttactccgcactgtccaaggcagcacaggagacacacctgactactgagcgctggacgtgtggctgaggaacgcacttcacgttctacatgcttcacatttcgacagccaccaggactaatggctgccatgtgaccatgtgacactgcagggctaggagtccccaccccagccccgggtagtgacaaggggaaccagtgccaagggcaggtcccggtggggtcggctctccccttcctggcccctttccgaggccaagagtggcgccagccccagagcagaccctccaggtgtgacccccgccccagcccctgcctgccttcagctgtgaggcctcctctgtttctgaagactctagggggccggctgtgcggagcttctccaattcttcttgtaaccgacatgccgaggtctgagccttgccggagagggaagtgaggtctgggtgagacgtcttataaacggctgtgctgtcaagaccctaccgagcacgcctggggaccagggggcccccccagcctgatggagcaacagctccatcctgtagctggaatgagtgggccagacccacaagttctgacccagccccaggccctcaaggctcctcagggatgcagaccacccacagggctcccaaggtgcctccagcctgtgctccacctgcccgggccccacccactgctgcccagaaggcccaggcccagcccaggtgctgctgggcacagccgagcggggcagggctgacccactcattccctggagactcagggcccaggggctgatgggggctgagagccaccaggcagggcctgacctcctcaaactcggccgtgagcttctgccgctgtgtctgctcatcctccaggatggcttctgtccactccagctgcgtcttcagctgtgcaaacaccgcaaacataacccggcagcccggtgaggaaccctccaggggcccagggatccagcacaggcaccgctctctagctgcttctagcttcccctttccctgccccaacgctcccctcgttggggagagggcacctcagcccctggtacagacttcggtgtggctcaggagcagctgatggggcctctgcaacctcaggggcctttaacgagactcacaggacaagaacgatgcctccgagccctggccccatgacaacccccttaacagccacaccatggccaccccagggacaggccctgcctcttggtgaggactcttggtggctattgccgggctcaaaactctggagagcgaatatcctgctagcgatgtcccagccggggttgcagtgggagacagtccccttcgatggctgcagaccctgcccagagctgctcctgagccctgtaggtgcagaccccaaatcacggactccctcttcgagtcccacctccccccaactcctccagcctctccacctggccacctttctgttccatgctctgtggctttctccgaacctggatgatccaaatggggcaaagcagggtggggtggggaagcagcggaggctggagcagccagtgcggggtttagtccgaacggaggcagcagggcctgcactcttctgggattagtgatgtgtctggggaccagctcaccgccctaacctgaacggggtcctgctcggctgggggcgcctctggggaggaagctggggccccagctatgtcaccatcctctacgtggctcttcatttcactcaactgctgcctgacctggaacaggaaggggtgtgtttgcaaatgcacagccagtcgcacacccaccatgctcactcctgcagggaccccctcggaggaccgtagctgctctcaacagccaaagtcccttcaggggacctggcttggtaactgtgacctatgtctggccacccccgccgccaacctgagccaaaccaaggccaccaagcctctgggctaatgagacccaatgtgctctgctccaagcccaaccggaggggagccctccctgggagtgaggtgacccctgatgggcatggcccacagagcaaaggaatccgaatggaaccggggggtggccgccacactgtctacaccccccgtttctccttcaaggatgcagtccactgctcagagccctttccggggtctagaaaagattatgagataacattcttgcctaacaaggtcccccacccctacgctccatcactggggttaggtggcatatctggctgcacccaaaccactgggcctgcaatttgaagggcaggtgtcactcgagaggctcaggtagaggttccaattggagacccaggtggggcccttggcataagctccccagggaacatgggcggtctctgaccctgcgctgaggggccaccccaggtacgtgggaaccccagacattcttccctccctctgaacagcccctcccaatgcaaataacgaactgcacagctggaagacaacagaaactccagggggttttctctgcacatccccggcctgggccatgcccccggggcctgtcacccagacttcgctcagccaaggcttcagtgagtggcccctagacacaggaggagacctggcctaggcagcactgccctctggtgttctggtccgggtaagacctgaatgaccaagggggaccgagggtgttgggagcgtgtgccggactcactggctgctgcagggggaatgccagcccatttttatttaaaatttcccaatttctccctgttgacaactaattcaagatttaaaaaaacaccgcagatcaaacagaacatgtctgcggcctcacagggtgctgctcacaacaccagccttggggcggtaccagatccggtgaggctgggtggagcctgccaaggagctgggacttggcatcagacacctgagctgaacaccaggagggactcaagaggccacctgcacaggcagagctccagtggtctgccaagggggctgctctctgcacccggcagctggtatggggccgggcgtggagcaggtcttccctgcatgcctgtggctttgactgaattgatctgagctgtcactgaggtgagaaaacccacagaaggcacgggacttgctgagagccccagggcgatgggtggccaggccaggaggaacccccaggcttcctggtcttgtgatgccagggactgcaatatccctgacgcccccaggtgactacaatgggctcacagggaatgcagacgcccagagctctcactaccttgaacaggggaccaggtagccaggggacgggagatggagtgggagcaccctggtcccaacagccacaggcccagctcagagttctgggcaaatgtgcaggaaggcccccagaagccggccccatgctgctcaacgggtgacactgtcccttccctaggctttatctttgagtggacacaaacgcatgactggcaaatgcatctcacacacgcaacgccccaggtcacactcctggcatggggacatggaggccacctaccagggcaagctcatcgctctgtttctgggcttcgctcttggcggcatcgagctgagattgagattctaggagaagttgcctcagcttggggagaaaacagaggcgggtgatgggaaaaaaggagagaaaaggagaaaaccagtccccgtgagttagcgccgaaacataaaacctaacacatccacttaaccaaaaccctgaggagggtcacagcatcgggccggcacagggctcgccaggcttcctacagctacgatttcttttttgaggacttaggaagaatggtgttcactgcgtacctctttcaggccttcacaaatgtttactgattatctctggcaaaaaagggccaaaagttggagatgattttttttttcagagatggtctcaatctgtcatccacgctggtcttgaactcttgggctcaggcaatcctcctgcatcagcctcctaagcagctgggaacggaggtgcccaccagtgtgcctggcttttttttttttttttggtagagatgcggtcttgctatgttgcccaggccggtctcaaatttctggcctcgagcaatccacctcagcctttcaaagtgctgggattacaggcatgagccgctgtgcctggcccaaaagtttgagattaaaccagaattgggatactgggcttgtgcttctgcttctgaagagcagaaaaagtgtcagatctaaatccactccccaccagatatgacatcagcaagccaggcagagaatccccttgcggagggataacctagaacgtcaaacgcctccctcggggcagggctgcctggctctgcccctgtcctggctgggaggctgcctttttgaaacctgccctgagagacacctcaggcctgacagcccaacgaggggcctgtgaggcttcgggcaaacgcctgaggactcggacttcaaggcttatgtcaccgagagctgctcccacagggctgaggagaagcagctcagggaggaccgcagatctgctgggcaggggctgcactccttggggggcagactcacccctgccacctccttggcgtagttctggcactcggcgctggcggccgccatgtgcttttccagctctgcctccaaatgcgacgtgtgctccctcacctggacagatgcacagacacgcacacgcatgcgccagcagcctctgctcaaagggcactcacctcagggagcaggctggccctgggataggtgaggcctctcgggagatccctgaggcccaccagctaccaagcaaacgagaaactagtccgcggcaagagaaccccttacggaaagtggcaggctgcacccgggcactcctggggactgacatgctcttagatttacttgcaaaagcaggtaccaagggtaccttctccagggctccctgtggcgtctgaagggggcagtggggccaccttgactgtgaaggccgtggcagaagccctgttcaccagggctgggcaggtctgcacagggcccgtggctgggtctcagggtcctctgaggtagtcaatgtctctcattaaggaaaaacaggatggacaagatcccttggcttgagagagaatgcctctcttaaggcacacggtccatgaggaagaaatcagtgaagtgtcctctgcattaacgtcactttcaaagaggctcccgggacaagagaaagagttctctgagcagagcacatacctggtccgaactttcaagttctccttttagcttctctacaatctcttcgagatgcttcactgtgacccgggactacaaagcaaggggaaggctccgtcagacacgagcacctgggggtgtctccttccgaggccatgctaggacccgagcgggactgacccaacttaggaagccccgggggtgcccactccgcccagctgggacggtcaccctggcgccatctggcagtgtcttcctaggcgggggcctcctggaggacggactgagctgtcatcccgcaactgtgcttcatagggtgtcgtggaaaagccccaccgagacacacgagtctcacaggtgacagagacaatcctgtcaactctcccctgggcttcatgtgctccacggcgccgggaggcaggcagggctgcatataccttctggagctcctcctctgcggcgcccaccttggccctccacacctgctcctcctcctccacgctcttctgcaggtctctgagcatgccctcctggggggaaaccgaggtgaggcagggccctctccctcccgagacccgcaccacacaaccgcatcttcctgtccctgcagccctggtgacctgccgtgctccgcctgctgacttcatgagcgccagcgttaggtggggagggaaggcaaccactgtcctgggagggaggtcctctggccagtgggccagtgtggctgcagtgccaggcaaggaaatgaggtctgtgacctgcacaggaccactaggatgcttgttactgccggggtttgccaccagcaccaagtgtgtcaatggcccaggacgaggagcacaggatgggctggccagagagtggcagggctagacctggcattgctcttagtcacaaacggggttcaacctggcagtcaccagctgcttaccccgtccttccccttccccagcttagagaccggccccgaaccttcaacttggccttctcttcagcttagaaacaatgacgacctcagagggtgccatccatttaccatgcagccgaagaacggggcccagagtcacaaggccagtgggcttttccaaaacaccaggccacctcctgccccataggccccgaagctctccttccctgcagcctcccagggatgcccagctgacaggttcccaatgctcaccgtctccgccaggatgctgcggtactggtcacactcggcctgcagtgtgctctgcgtctcctcggcctccctcaacttggaggccaggtcctgagagagggaagaacaggtgtttagttagccacacacaaaggttcttctcttggcttcccgttgaaatgacttggggcagcccctcttcctggggacaggggagcccaacagaggagccttgccaggcagccacacttaccgaggagggctccgcgggagctggcgggtgcttcagcagcgtggggcctttctctttgagatcctgcagccactcggtgtaattctgcaatgaaacacattcggtgagacccggggacattccctgagaactgtgaggtccccgggaaccaccctcccctcctacctgttgtgccaagacagagagttctgggagcagagccagcagggcctccatggtctgcgcctcaatcagacagagctgcttctccgattcctcctggggggtgggtggggaagagcggaaggtgttcagctgtggaggtgtggggcacctccccaggtctttactgatatgcccgggtctctgccccagaaagggcacatcctcagctcttcagggaagcgacaagaatcaaaggagaagatgaggctccatggggctgactgtaagcagaggggttacccagcctgtatctggtccatttcaaacagactaagctctgatgaaaggagcatactgggtcaggccaagatggcaggtgccagctcccgggacatctcccagcagggacagtctccaccagctctcacttcccgagctctctgggcatgtgtgcatgtgtgggggaatttggggggtccgcagttgatgtgtgagagccagggcaggaagaagggatgggaggacactcatggcccccaatgttttggaatctagagctgtgatggggatgggggtgaaggcagggaagcagtgcgtctgctggcggcaccacggttaggggctagtggcagccaggaaggggcaacccagagaggctcatctccagccaccctggagagggtggatcagcattccccctctgcagagggagaagcccactcagaggagacagggactttgcaccctgtgccatgctgggtcggacaccccctcagtcctcaacgaagagccagcggcccccattcaaagcacaacaaagataaggaaacaaaaggaaacaaagggggcccaagggaatcatgaagcaaagcctaggaccacagtgtcccccgggagagagctgggctctcccacaccccgaggggaaggctgctggggtaacagcctgtgtctggccctgccaccacctggacaggcctggcctaagacccagggaggccccaggaactccacctggatcagagctgatggagtgttaactcccccaagcagagtcctggaatgtgcatgaaggatgctgaccaccggacacccagcctgagcgcagcgccctctggcctgacgcacacctgagaagcgggcccttcctggctggccaagttatccacaggtagggcccgtgacccatgtggacccttgacctcacgaccaccactgaggcctctagttgtgagtcaaggcaagctggagacccagaggccaccttctatctggatgtgtgaccacaatcaagtcaggtgacatctctggtcacagcttcatttaccacatggtagccagacagtctctgaggtcactgggggctacaaggccaagattctaggagtctaactatagctctcacagggtggcctgaggccatccttcacctcctgccctagctagttgtcctcatctgatacaaccctcaggcttcctgggaatcaccgcaaagctcctgccattggggcagatattcctgtgagagaggctgggagtggaggccctttcatgaggtaggaaaacgtgtgtgacctcaaagtgtgggcagggcctttagttgcagctgctgctggccatgtcccctggccagagcctcctcactggctcctggacagcccagcaccccaaaagcaacccgtgggctcagacactgggagacacctgcacacgccccacctggacagcatggagcgcagggccaacgcggcctctgttccccgagtgctcgctgcaaacaatgtcctcccctctgtgacttaaagactcctcatgggactgggcgtggtggttcacccctgtaatcccaacactttgggaggccaaggcaggcagatcacttgaggtcaggagttggagaccaaccaagccaacatggcaaaaccccatctgtacaaaacatgcaaaacttagccgggcgtggtggtgcacgcctgtaatcccagctacttgagagggtgaggcaggagaattgcttgaacccgggaggcaggggttggagtgacctgagatcacgccactgcactccagcctgggcgacagagcaagacaccgtctcaaaaaaaaaaaaagtctcctcacagagccccctgggccatgacttcagaggcccaagcagcaggattacccgacaaaaggacacacaacagaaataacaccaaaaaagctcataaagagtgcagcctcgggctcactgcctccagtcccaccccagcagctctgtaccctcagccagagagaccagcacggagaagcccatcaagggggcacccccatccctctcttggaaaggagcaagtgaagaagggaaggacggcagggaaggaggtgggagggggaggtggatgtagagccggggtctggcgtggactcaggagctctgaggccaaggccactctgtgcgcacttagtgcactgtgtgcgtcctagtgcacctgtgcgtctgtgtgtcctagtgcgtctgtacgtcctagtgcctctgtgtctgtcctagtgcctctgtgtgtcctagtgcgtctgtgcgtactagtgcatctgtgtgtcctagtgcttctatgcgttcctagtgcctctgtatgtctgtcctagtgcatctgtgcgtcctagagcatctggtgtcctagtgcatctgtacgtcttagtgcatttgtgcatcctagtgcactttccatggtgggggtgtgagtgtggtcgggctctgaccttggcctgggtcagggagagcagcttctccttgcaggcctgctcggccgtggccagtgcctccatggccttccagttcttctcccggaggtcctggaggggacacaggtgaaaggtcagcagcctgcactggcagcacgggctgcctaagctggtgtcagacaggacagggcccagagaccctccttgatgccaccctggcccacagaggacctgccacgggacaaaatgccccttccttggcccatgaccatggcgcctgaacacaaggcctgggtgccgtagccagaggcgggcagcatggcacagggtgaagaggtggcgccctttcgataaagacaccactagccaaagggaggagggagggccagcctgtgtcctcaaagggaagaggttcctgctaccaaatggttagtgctgatcccttgggccagctctggcagagcctggcacagggaggccaaggccagggcctgccttgggaagctgcagcctctgcagggagcaacagggccagccagcaagcccggctctgtgagaagggggcaggagggtgtggccgaggccacaccaggacagcaggcatgccacctgccgagcttctacatccccttctcctgggaccaggatccccacttagggcaaccacgtgactcaggccaggccaacagcacactgtccccaccccagggatgactccacgcttgagcgagtggcgcaggctgatccacaggcagtcagccctgggtctttggcggaactcaggggtgagtagaagcaccccccacaccctggacccccacagcacaatggggtgtagaaacacaagctcagccctcccccgagtccagggcgggtgccacatagcagaacctttcccggccccacctgtgcttccctggcccgtccgtccccgcctgtgcctgccgcactcacattgttcttcactttctgctgctcgacggcctccctgagctcgatggcctccttctccagacccgacacctgggactccagctccttgaggctgaagggacacaacgaggtcaccgcctaggctccaaggggctacagcccctacagatcccacctgaggccccatccagggaggagtaccttcgaggctgaaccatctggccagggacggtcccttctggctgcccccacctcacccagcgtgagctcccagggaagcctgagcagcccccaacaccctcccctccccccgccatccagagcactgaccccagagctgtcaccagagtcccagttggtgacaccggagagctgggtttccaggagaggtggaatcgtgaccctgccctcagagctctcctggggccctcacagcttttccctgcatcatgtgacagcctccgccggcaaatcaccccaagagcgtccccaaaagaatgagactccgaggaagaggtgtcagcaggccagtggcaaggacacactgacaatcacacccttggcagccactgcccgaattctagaatatctggggctgaatcgctcctctctactccagagcaggatggcccagcctacacataactttcagatcaactgtttgagaaggaaataaaagcaccaatttctgccagacacatctacatgatgcaagaaaattcagattaatcctaactacaacatgagttcattatcctagtaatatgctgtgtggcccaagaatctgatcttaaaacacaagagcaaaacaacaacctctctaccccaacaaacaccaccaggagaaacaaagtttgcccatgctttttgggaaaggaaggtggacaaggtttggttgtgggtcattctgggccctcagggcagctggcttcctttcccagtccccaagccgcagagcccaaatgccagggaacatgggctgtggcctggggagctgcctctgctgagaggcacacagggaggtgcttctttggtgacgagggtcaggacaagggaactttgtgaactgatggcctaggacacatctgaccgtgtgcgagggaatgcaggacaccctccatgcctcccccacctactgctgcatggacccctagccacggcggccaggacctgcctccccagactgtgggcatgtgctacaggaggcgagccccagaagtgatggtcacaaggactccggcccctgactcgagccaccccacccaggtgttggccggccttagcaacagcaaataaacactccccgaacatggcctggcgctggtgctgctgacacggagggaaaacaaggtctggccagcagtgaagtcacctcacagatggaggaaaacaacgctgagacgctgccagctctgccccgacgcctcaaacctgtgctccagcagcaagcctgggttcgccattctgggttgtgcaaccatttttcctgttagagttcctgacctcagcccctaaaatcccttgcttgtacacacagaacctctgaccagtcagtcccttcccacagagagatggacaggtggatggacggacggcaggtggcagggggtgctcccaccctggctgaggccactctggaacgatgtgatcacgaagctctctgcaaggccgccttctttcccgcccaggcctgtcccgtcctctaaatcaccggaggatgggggagggaagggagcctctgaaaggggctcttctgcagaggacctgagcaccctcctgaaaaccctggccccccaagggtctttggtcccccgggctgaggctcaagtgagcaggcaggctgcttccccagcttaccgagtctgctgctggtcagcctccgcctggctggcctggaatgagagacaaaagctccttggtctccaggagactcatctcacgcagcggggctagtccacccacctgctagatggagttccctttcctccccgtggccccaggcagaaggctgacctggacgtcctgggcatcccgcgcctggcccgcctccagcagggcctcaatggaacggattctctctgtgagctgggagttctccgccctggcctcctggagctgcccgtggaggccactcagctcctcgcatttgctgcgcacctccgcctcggaggactgtaacttgctgtgcagctctggtgcagaggaagggaaacgagaagttaagagactgcaaaccccagggggtgtggaggatgccctcactgctgccctcttagcacatgtggggcaccgagggcttcctcctgcctcctctgtgtgtctggggctcttaagacatactactgaccactggggcctcttgttagcggttgaagaaagtgccactctggcatcacttctgagaaccgtcagggtagaatgcaatgctctcaggacactcatgagaaaatgatagagagtggaaacggactccagctgaggcttttaaagattcatcttctagaagactctttttcttactgagaccagaagttccttagaaagtggctaggtggaccccactgccacacctcccccacctccctggctgggtccccctcaacccccaagacctcttcacagtcgagaaaggccagggggtgactcttctgccctgggcccctttctccccttgaggtgtcctcctcctcaggtcacctcagacagtcccatgggtctaagtgtcatcttcgtgcctctgaggctgcactctccccaaccccaggctctgccatctgcctcttctaaatgaagctctagttagacaacgcaaacccaacatcccgacctcccaggactcctcatcttcctccctcgcccactgccgaagcctacgagcccacacccgccatctgtcaagttgccctcttcactagcacctctgcggccacctgggccctgccctgttgccttgggcctcagcaactgcaaggcctcatccctggtctccatgggccactcgtgcccctctggtctgctctccacctggtgtcagtgtccagaagcgcacatgagacgacttcatctcctgccccaagcacttctgtcacaccttccacggtgcccaagctcctcagagggagggtgacctggccctgccccgccaccagccttctccttccagccacacttgttagcccatttctcacataggccaagtcagttcattcccacctccgggccctgtgctggcctctgccatgcatcccctcctgcctcagagagtctccaggaccacgcaatctaaagccatgcccagccctctggagcaggggccgggaagctggggccgtgcctcccaacctccatttttccaagtgatatcaatgaagctttctttgaacacagccaggcccctctgttcactcggtgttaatgggcacttttgcccactgtggcagagctgaacagttgtgacagagactggccagaagcattcaccatccatccccgacagaaacagttcacccggtgttaacgggcacttttgcccactgtggcagagctgagcagttgtgacagagactggccagaagcattcaccatccatccctcacagaaacagttgccaaccctgccctgaacacagtccctgtgtagagggccctgctgtgcaatcctgtccttgcaggtgactctgtcgtgtaacccccagtccagcccagcccggcacccacggcagtgcttggcctggggaggggctcgggaagcgccagtgagccaagggccacgggcctctcactggcaccttcagctccctttctccaggggctctcggccctccatccctgtcaccctttccatgatcgactgcagcaagggaaccacaggcttgtaaatcctgcctggccttctgggctgactgagctgggagagtagaaaggcccagaacacacatttagctgagacgcctcaggatctccctggttcatccacagccactgcggacccaggcttgggagggaagcagtgccttccacccccatatgccctgctcccatgcaccaggccctcacaggccttgccccccacttctagcccctgtaggtcccatcctcacagctccatccccccacctctggactgcgcctataggctgactgcgccccccgccagcccctgactgggcataatcccctgctctttgactttctgaggggcagtcaagggatccgtgctgccctcacccaacaggcctaacccactgagttctggcactggcagtggggctgggccggcatgcagacccagcaccctgcactgaacccccggccccactgccgccgcccttaccggccatctgctgctgttgctcctgggccttctcggcatccgcccggaggctggcgtggctgctctgcgtgtggcacagctcccggctgacctcgtccaggcgcttctgcagggcctcctcactctccctgtgggacgcctggggacgggcaggggagtggggcagtgaagacgtggaaggaccaggccctcagcggctctgcggtggaggcggacagagctctttaccccaccaaagccccgtgcagtctctggtccatgtgggaaggaaatgcatccctcgaggctctagaacccgcacaggcttcacttcggccagaaccctttcatggggagaaggcagctgccagggacccacactcacttcccagttcttttctgagtccctatttttacattctcaagtgattcatgaagacatggttactgcaagagtccaaagatactgattcagagtaaactagcgacatttcccaatccagtcctcgattcctctcccaggggcggacagcttggtgggtctcccacctgcagctccacatgttacacacacacacgcacggtgcaccactgcgatcacgctatagggcagtgctcttagttcttaatattaggttgaaccacgtgaaattgtcagtgtttgaccatttttacctacaaaaatggcaatttcacatgcttcaaaagtatctcagagacatttcctcactcaggacagacaggcccaccacacccttgtttaggagccacacagagcttcagtgtttgcccagttcccggctcagtgtcaggcaggctctggcagtcccagtcggtgctccacaggacaccctcatccacctgtaaaggattcccacacactggggcagaagtgctggccaaggcctccatttaaccagccctttggagaactcagttctccaaaaagcccgaccactgattattcattaacaagcttgtctgggggcagaaccaggtaagaggggcatcaacagatgactgctgtttgaataagaggctgtgagttatccctcgtcaatgcctttaccaagctgatcccatccacatccattttcattttcttttagggcaatggctgcacaacctggagctggggtaactgctcagatgagcaccatccgggcagaggcgtggctggagccagtgaagccatcaccaaggaggtggccactaggccgtggttcacgtgtactgtgcagtgaaaactgggggcagctttaggatgggcagtgctttctgcattagaacgtagcaggggattactcagttccaactcctagggaggaaatgaaagaaaggagtgactgcaagctgctcccagaaagcacacctgcttctcctctgccaggtgtcccgggcaggagcctgccttgcacccaccggctccaacaccctcacacctctgcctcgaccaggatacatagggcagggtcattacacgactggaagaaaacacaccagctgctgctgctttttttctttaagaaaagggactccagctcagactgcagggagactgaccacacatgttcttccgtttgttactaacattgattagaactctgattccagcaacaagcaaacaaaaacccacccaccttcaggaaccccaaacttaaaatctttgatggaaaccacgggcctccatcttaagacctcaggtgacaactgtctttgccttgaagagaatgttgttagcacagccaatcacactgaacaatttcagaagcgggtcccgtggctgggtgggcccagctggggactttcataaggccctcctggatttctaagattcagttcttctagaaggatgtcatcagcaccttcaatgggtactttcttccaagcaggccccaagaggccgtccggggagagacaggcaatgaggggcagggcacctccctgatgccagtgctccaggaccgaaggtcagcacaggccacccccgccctcattcctgcagagctggctggcagtgaaggggcctcaggtgaaggcaggacagtcacaatatggaaagagccccattttcacctcagcaaaaaagagacattttctacaacctcaaccgccagtctgacttggagatatcttgaataaaattttgtagagttcacattgagctctttttctgaaaagcactgatctagtcctaggcactctgggtgtaatagcatggttaactcccacagtcaccctgcaggacagctcctactatcctgtccatagtacagatgggaaaactgaggctctgaaataacttgctaggaagtggcagagccaggacctgaacccgacagctggcgccaaaggcctcactgtcaatcacagacttgacaggcacagaatctttggtgtcagactggagagcagggaatcctctgcccagccccaggctgtggacaaggaccctgagtctggagaggacaggagatactgggagcctgggggccctggctagatccttcgtaggaatgacacgtgatggtgacagaccaagcccagttccaggcccagatggaccacaaccgtccaggagcctttaaaacacaatcatgggcaggcacaccccacagcttctcaactccctcttctgagtgggtctgcttcacatgaacatcagaaaacaccaaattatccatctcaattccaccccaattcaaactgtttctttgtccatgttctcttttagtccttgcacacgctcaaacatcactcttaaaatttcgtgtctgttctagttccaagaggcagcactaatgcccccacgcactacagcctggtttcaatgatgggacagaaaaagggccctaagcccctggggtctcattatccagaaaagttaaacccaagtgggcatgacatcaaggtgcctcatgccctgggtaacagccctatgtggggtccacctgcccaacacaggccagcagacggatgggaattcatcaggcaaggcctctgggctgggaaaacatgctgcatgctgcccgtgtccccctggggacagggggacaatcttcctccctctgaaggagaacaggcaccctcctgggaaaaaaggcctcaaggccacacccagaagctgagaaagaagaaaccccactggccttgaagccagaggctgcgtccacagcctgtgggctcagctggctgctccagagctgcagtaccacagtgggggcaagtatgggaggaaaaacacggctccagagcgagacttggggttcaaattctgcttctgccatgtcctggctgggtgaacttgaggtagttgctgaacttctctgcacctcaaactcccttatgggtaaaaatgcagacactaccagtgcctacctcatagggttacaaggaaaagtggctgagttaacgcttgaaaatgctcagaacagtgcttagcatacagaaagctcccgcttgatgccagctgtaactactaccaaggagactaaggtgaagagtttgagccccagccctgcagacaccatcatctgtcccagtcaaggctagaaacgggtgcccagtgtggcacggccagcctgggcccatccccgctatgcagacaggcttgctgggcagtgaacagggcactgaggcggccactgccccgactcacctgcagctgcaggacctgcttctcgaaggcagctgccttggcttccagagctttccgctgctgctcatcttgccgcacagcctctgacttctccaccagctctttgctgaccttgctgagctcctgccgaagcttggccagctctgcgttctgcctgcaagacagtcaccagcccgactaatggaaagaaaagggtgatgggatcggtggtccaagccctccctccaggactccagctctcttgtaagtaagcagttgcccaagtcttgaagccattaccaaagccacttttccattatcagctgtgtggggttgggcatgtgttttgttgaagacattgttttacctatatagtgcatgaaccagagacagcatagagcaaatgtgcactaaagcatcccaggggagcccctcccagaaacagccagaaattcacagaaaacggcaacacagttctgggtgcaaaccagccttgagatgaagatccacccgccttgacgccctgtaggcctgtgggcagcagcccacggagtccacgcgccccctcactggccagctggaccagggccaggctggggaggctgcccaaagccagagcctgaggtgcttacaaaacagacccttcaggactgcacttcaaaagctgggtctcaggagctgggaggaatgttccggagttacagaaggagacttaaaggaaaagggggcagctggaggcctgcctttccagcgtaaggcgtgtgatcaggatgccactccctcactagcagacgctgcctcaaggccaaagactgactgtccaaccaagggacaccaccagacgagactgtcccaaaccctgggacgcagcaccaggccaggcggagctgggaaaccgggctgaggctagatttgctctgctgcctgcggggtggtgggtcccacctctctgacttgggggctgcctcgtctgtaccggggaggccacaccaaagcccactgtaggtccatcagctccatgcttcacaaggccaaggttcaagtgacctaggagggaggcggaaggtcgtgtggtgccctcaagatggactgggagctctgaagtgggcctgggaaaacacatcccgctgctgagagccacccaccagccagagcttctggactggcagggccactgcctcagcgtgacaagtctcctggctttagagccttacccattaaggaggccacagcagatcctatgtggggagacgccagagaatttctcagtccccacatatgccttctgctgtggcttttggggaaacagcagccacaaacctccaaccagccgatggctcaggaaggggacccagaggggacaggcagaggggaaggcagctgctggatctcactccacgtcagagggagccatagtcaaaacagatacttggcccagctcccctccctgtccagctcccacactggacttcccctgacccgactcccagacaaggactaagggtgccagcgtgctctgctgtggtcagcccctgccttggtgagagcagaggctttcgggataacacagagctctgccaagtccctgcaggacacttcggaccagagaaagcaaagaaatgtacaactaaagacactgcagtgggtttctcgagggctgccactgagggtgtaatgcttaaatcagggaagcagaagtgcggctgtactcaactccggaggggaagtgcaccctccggcccacttgctgtgggctgcggtgcttcagcaactcagagacaacactgagatgagaaccccgctaggcaggtgggtgctggaaaccctccctagtaccagtgcatctgaagcaagggtgttgcagagcaggaggctgtgctccagggcacagtcgaggcccaccaccagccaccacagggacgctgggccacctgttagaagactcaggggcccagaacccagacgggagatggaaggtcaggacggctccgcacacatgtagggcccatgcctggctcttgtgccagctgccctggccgcagcctcgtgaagccttcctcgctccagggcccttggggaggtgctgaggcaggaaagctcagcttacttgctctccacctggctcgtggcctggttcaaggcatcccgcaggatggagttctcctgctgcaggcgggccagctgcgtgttggggccattctccagctgctcctgaagagtccggatctggaaagtcacgggcaagggcatcagaggcagctcggcctcacacacagaactgacttctgagcagtggttagtgaagacacagcccacaaaagaaaacccccaaaagcctccaccttttccacgtggaagttaagaggatcccataaaacaagaggcctgaaaattgcgaagcttaagcggccaagcatgactcccacacccagcgacacctctctccctcctcactgctcatggcctgcccaaggctgaacactcagcccagggtctctgacacaccccatgaacatctgcctccaaggtcacatggttgactgttctaagacaaagcacatgcaccgcctctaacccccctgaggaagcctcgattcctgccctctgacctccagcacgtcctgagacatgcagcagggaggaggtcgcagcccactatgagcagggtgcaggcttcagactttgactacagggccagtctgggcagccgcccagtgctggccgctggagctgtgtgattttcaggccttggtattatgggatcctccccaccatgtggaaagaagatagagcctgcgtttctctaggttcacatgaagggtgagaacttcacagacacccaggaggcagggaaacagggctggccatctgagactaggctcttttgaaaagtgttctttaaaatgtatttcatacctccctggcttttaacattatacacacacttgggctgccagaccctgtccagccaaatgcaacagcccctggactcctaaacctgaccagaccttacagacccctgtgggcatcctcaaccccctcctcatgcctcaccctttgggcctctctggctccctccgtcctggacctggactgggtcctgtcccttcccatgcccccgccagccactacacccaccttgccctgcagctgctgcacctccttcacgtgctcccggtagctggcctgcatgcgtgcctgcacagccgtgatctcctgctcccgggccaccagctgctttttcactttggcctccccggctgctgctttggccttttctgctgccatctcctggggggaaagtagcagagagaggggctggtaagccttgcagggcaggagcctatcagaagggagcaagagcatcacccgagctgggaggctggagagcagagcacagacccctcctgctggccgggttctcagctagactcaagccagctgcagtgggaacgacgacagacaacaagggatccctggaaaccctgctggccctggccggttgtgggctcaatgtcaggccttggccacagtggaggtggcagatgcggcaggaacagcagagacacacggtgctgtccctggctctccagggcactggctcggccctgctgtgatgacaacaccccagcttgactcagtcaccaacatccagggcccctgggacacctacttctactcaagtgccttcatcaggactgaaaggcaccaagccctgatggctagggtgggggtggggccagctgccagttccgccgtggctgggggtagggcatgcatctctgcaggcggtcgctctgtcctccacccagggggacatcggctccgatcagtgccagatacccacaggtgaacatggatgccgagtctggggggtccggcgtctccagcagggacagagcaggatgggaaggctggccatggtctgtgtcatcccagagggatggcctcaaccagaaaccatagggaggcagggtgacaactcaaggaaaggttgacacaatgagcccctggggtgggggtgttccctgtctagcaggcctggacagaccagcactgatgtgatgtgaatacatatcataaacacagcaggcctgagtgaccagggcacaagcgtcccaccagcgtcaaggctgctccatgggcagtgggccaggagtgaggaagtccgtcccctccccagaccaggactatagggaggcctgtcccaaaggccagagtgtccctcttgcctgagatgggaaagaaccctgaggaggagccactgggtgctggtgctgttccgtgctcctggtactctctgggacctcctgggacccttggcctcacttttcaaagacaatcatctttttggctctgcccggggtgagaggcccacaggaacctgcaggtctgcttcactgattagctacagaagtggggggcgggatgagctgacactgcgccccagcactgtcccatttaattttctctggaagacgaggattacaatccccatccaagctgaggtcacagagccttggagaggacacacttgtccaaggctggggagcagctctaagaggcaggggtggggcccaaacctaggactgtacaagaccaaggggttcccagaaaggggaggaatgaggacgcctgcccttctgtgtgggctgggaagcccctggggaaagggaggacagcttagcggtgattccaggacccctccgcacttcctcctctaacacacgtggccccaccggcccactgctggcagacaggtgtggtagagatggctggaagcctcccaacaccagcagagaggaggccgctctctttgctgagtttccgacacaacggcccttccaagtagatggtccagccttgcgaagaaaccaaagctcatggagaccaggcattcccacagccacatggatggctggttgggaagccacacttgggtcatcctcagccctcctctgccacctggagacacccttcccagccctgggcaggcctcgtgcagttccaaggtccaccccgctcagggtctgcagacccctatctcctgggggtcagcgtcccaaggccgccaggattcaatgggatcttccccctcttttgcctctaggctttttaaagagcagagaaaagtcacttgtcctcagtgcagctgtttagctctctatggtttctttttcttcaaagagctcagagacccagggttccttctgcttgtcaaattcttaattcagttgcaagagtcagatttatttccttgaaaagcattcctgatggtggtgggggggttccggcgcacaagaagacaaggcttggcaccatcactagcattggctcagaagtgactctctgtccctacttcttccaggcgctgttccctaggagtagtggggcccctcatggtgtaagctttgaggactgtagagagccctccaacctgctttcccagccaagcaaggaagcaacctccaccaagaaggcctggtaacaggaactcctcccgtgaccccatccccaggtaaaccctctgagggtcccagagggccttggggctccttctgtttcacagccccatctccttctgggccctaaagccagaacacgggaccaagcccaggacggggccagtccgaggcatggcttcaggacagaggttctggtgcccaggaacatgacagctggaatgtttttccagaaggttgtgccttcttggttacatcactggagctctgcctggactcctcaaacccccaagagattctcagacagccaggacagagttctcaagggcgtctgagcccatcaactcctgcagacagtgtgtggactggtccttgaacccaactctgctgggacttcgcacatttgggagacctggatacagcagatgatccaaattttctttctcagtgtgtccagatcatgccttcagcatcagaccccaagaaacagaattaatgaaaacccttttcaactataaaaacttctctacaaggacaaagaaaacatgtcgaagggactagaacaagaaacataggttccatccatctccccagctcccgagggggattaaggtaagaggaactgccacactctctggaatttactgtctcacaacatttccctcagcagtgctgggcagttgcagtgttaccgtaagaatgaggtaaacaggccagggacggtggctcgcagctgcaatcccagcactttgggaggccgaggtgggcggatcacctgaggtcgggagttcgagaccagcccgaccaacatggagaaaccccgtctctactaaaaatacacaattagccgggtatggtggcgcttgcctgtaattccagctacttgggaggctgagacaggagaatcgcttgaacccgggaggcggaggttgcagtgagccaagatcgtgccattgcactccagcctgggcaataacagtgaaactccagtctcaaaaaaaaaaaaaaaaaaaagaataaggtaaacacatcggctctgctcaggactctcaacagagagcacgagcacagggaagagaaacggccaaaggcatcgactacaaacatttaactatttacaagaagacaatgtaaaatactcagaaatgcttccaggcttcccctcagctgcgaggtggcctggccctctcagtggccacttgatcactggcggcctgctaggctgagcctggtgagaccaccagagtgggtctgcgccaccaggcttgaggtctgacaggagccagatgcagccaggtgatgcctaactgtaccaatgacctctgtgcagaacaggaacatgggagctccagaaggctcctgagggagggaaaccaaattgagtcttccagagtaagaagacaatgtccagacatccaagcacggaagggcattagaggccaagggaagagcaagaggagagccccagaggagtcacgaaagggcacagaatgtctgagcacaggtagggaaagggaagaggtgaggccagaggcagggtgagtggctgagctggggcctggggggcagacttaggtctgaagattaggggcccctggcagagcttgatgggggtcctcacagatcagcatttgggagcccaacaggacctcttccggcttagggagcagagtgtgggtggaagggaggccacgcaccgttaaccttctcctcacctaagaggcaaggccagtggtctccgaggaggctgggtactgaatgaggaccacaggctgccctgagcatgcagccagggagatattctaccaccccagcagggtggagagcagcatcgaagagcggccatctaaggtgtgtcttctggtcctgcccatcccccacccagtgaacttcccatctggctcagagccgtgaccctgaatttgcgacaaaaagtaaggctgccttacttccaattctttgtgctcgagcagacaaaggcacccggaagaagggctgtagcccagacactgttggacagtccaccatccaggccctccccctgcgcccgctgcccgggatggagaaggcagggaggcagggagagggcaagagcaagcctgcggtgctgcatggggcaaagacggctttcaacagggcctgaccagtcccagagggccagggggcccctcaccctgcccttcctccaggaaggctggggcaccagggcccaccctcagcagcagagaggtggggaaagaccccggtgaattctgcagtgggaagaacagcccctatgccatggatcccaacacaatctcaacgtgccatcagccccgtcctatggcagcaccaacccaccaccgtttgctgttcagagtgcaaatgctacgtgccacgccatccgctgatacggggagccagggtttccctgcacatccctcctctgacatcagaaaaagggagaagagcagcccctccagtcccctccccacaaggttttgcataatcctcaagaaaacaaccttgaatctactgtggccaccctcctttccaggcacagcccctagaaagctggcctgtgactgcaggacctgtctagtgaaagccaggtctggtccatccccatcacaaactgatgctgcttaacttccaaacccttgcttcacttccctgcgttcttacagccacgaaggaagccaccacgccgtagagccacgagcactgccaagggtgagctgccggcccttggctctttaggcagcagataagcagcagtccctactcagcagcctgacagccagctacgttccaggcaggccccagcatctcggagcccgggatccaccgtggatggggcgggggtcctctgaggacgggagaggacaaaccatctccgagcccactcaggctgtaccttgttgagctccctcagtttgctcttggcgacagccgcatcttcctgttctgtggccagcagtttttccttctcttccagctggcgtttcagaatcgccacagggtcacccttctgagtggcctagaaatacccagagatgcgttaacagaggggacaaatgggacttggctcatcccctgaccccggacaagagcagaggcctgagggcttgatgaagtggagcaggggcttcgagtcaagggttccactgggactccagatacttgtggggaaaggcggccccgcctcagccatcagcctgccgggacccctgacccagcgtgtgttgggactgtcaaggccaaaggctttgaatccctggagtggcatttaggagtgtggtgttgccagctcctctgaggggcagctggccaccatttctggcctggagcctacccgagccgggcgtgcagcccgtaggcctctggctgcagtatgggggccgggtactctgaggacagtgacctgaggagagccaggcctctccctggtcatctgaatctcctatggccactcatacccagtagagcccccagtgacgactgacaagctctcggtgccactgagactgtgcaggatgtgtatggccaggaagggagtgaccccactggcctcagggcacacctgagcatctctaaccactaaatcctccagcacagttaccctgaactctgactccagtgaaggaatgtgccacgcagcacttcttgggcacagctcttggccagaggcacgagatagctcagaactcttagcctctgaacctgcccccggcagcacgacggaaaccaggggcgctcctgggctggggaacctcacagggccccacactgtgtccctatacctttctttctgcaccctgagctgtggccacaaactggctaggccccagctccctagatcccataccctgccaatacagagccctgccccagccctaaccatctcaggagccaggccatgggtggcttgacagaagccaaagcacctgcgagcgatccctcggggtggcagaattctgccaggaaagagaagtggaggctgtcctatgaatgtcctctctgtggcagagggaagggcaaaaccaccctagccagctgcagtggcctctgagcatggccagcaggagggtgggcccaccttgtgccaggtgtcctgaatgatgccagccttctcagacaggatctcgatgagccgctgggcctcgccctcgttgaacaccatgctcccaaccgtggagaccagcgtcttgtaggggaggtagagagggccgtcggcatctgggggccctgtgcagcaagagggaaagagctgagacttaggcccataagccacaacacacgtggccacaatgcccatcacaccaagaaggttctggtcacagccacgaagagctctctgactgcttggggtcagcaggctgagcatggcgagtctgctccagtgtctcctgctctttcaggacaccaagaaactgactcaacgataggtccctgcaccgtcctaactcgcccataggaagtcccagcctggggtggaagtagagctcctctttttttttttccaccatcaagatggcctgcaacaaaattaagcaaggcgtactttttccataggcttttctcccttccttttttttctcgcaaatgcactggtcctgttctcaacctgcatggctcaccatggttctccccactggctgtgactgagccccgtggccttgtgggacctgactgggcagcgaatttaccgtccaccacacacagacacccagagccacactcctgcagccacaggaggagcacagaaggcaaggagaggctgcttccacacatcagtgcaaaccctatttctagctccctggatgaagcccaggcagtgacagggtttgggagagggaaggctggctgggttcttatagaaagggcctgtccactggccagtccatgagtgactgcctggaggacagggagccatctgccaacaaacgtcacttctgaaaaactaaaactgccgacaccccccacgcccctccccacacacatggttttgttctcattggggcttgaatgcagcctcggaagcaagaaagggtgaaccaagatgccacgcctgagtgcctggactcttccacagctgaatgacagcactaaaaatgagccaaatcagagagcagacaggcctacagcagcccctcagctgagcccaccttgggaggacaaaggagagggctggtttccatagcaaccctcaattctctggcttgtcacaatattttcacttactagtcataatattttcattacaagtcaaagcatttggcacgataccttaatgaggggaacgtgggatgtgggcgagctggttgctatgagcacctttattttataacttcttaccctggtgaggctcgggagtttaaaaataaccatgttgacaccaaaggcctaagaggtcatgggtgccacgaaaacaggtcctggcaaaagcatgccccttcaaccttcttttcactgaaatacgtgtatgtacataaagtaattttaatgcacacacaagagaaaattctaacccaaaagccaaaagaaaataaaaacatgcatggctcactctcgggagaaacccccgtgttagttcacatttcggttcccagccttcctgtcttccccctcagcctgcaggtgcgtgtctactgccagcactttccaggagacagaggtcacttgtttcaaagacacctctgtagttacagactgggcagggcagctgcttcagccggcgtctagctgctggctgcaaggacatttccccctcctgactcagaaaagcgtcctgcgccgtccgatgtgctgggcaccagccatgtgtggctactgggcacctgcaacgtggctggcctgactcgagatgtgctatgagtggaaagtacacgtggaatttagaagatttggtatgaaaaaaaaagaatgtgaagtatctgtaataattttatatatggattgtatgttgaaataacattttggataaactgggtcaaacaaaatgtatcgttaacattcagtccatttgtttcttgctggcctttttaaatgtggctgaggacatttacatcacatccatggctcacacgtgtgtggctcacattctgtttctcctggactggctggcctattcctttccagaaccagggacccccaaagtgccccctgctgaattcctggcagcccctggtcctacagaggttccagagtgacccaagagctctggcctctcttgaactctctccttaaagaccacccttccaggccccacggcccctactgcactgctgggtggggaaacatctggataaggcagctggagggcacgcgctctaggacgccgcttcctgcacaggggcagcatggccacatgctcacccgccgcaggctcagtccacagagtgctcccgagagtgttctcggagcggcattctcataaatctttattaaaactttctaacgtaattccattctattagatattttaacagaaaaataaaaacttgcaacacgcgaaacaaacgcaaagctgcgtacagcaaaatgttaacgctctcctctgccacctctcatggccccccagaaacttccacagcctttgccacactcatacaaacactaccttttatactgtttttagagagctataactttacaaatcatttttcattaaatcttttaggtaaaaactctgctgtctcaattgtccccaaatcaagggcagcacaactgaaagaaaaaaggaaagccctcagaagcagaggcaggatttctgggcctccagatgagttgcatttaaataacgtactaacgggagcctaaggcgtgcccagcacatcacttagggctccagcaaatactcgaagataccagtaatcttccgaattgtgaaatcttaacgcactaaactaagtctctcagactcaacacctagtctgtgaaatcacagacttcaaaaggcccagggtgcagtgaatgctggaaaagctcagctccctgagggcttgctcctgcggctaacgctttgcccatcttggtgggtatgaaataccaggaagggacaggccaggaggcctggggagtgaccagggagcaggagacccaagagtagagacgcaggccagtgtctcactttgatggataatccagacctctgtctggcaggggacacagcaacaccccaggggccaggccctgcaggaatgggacaggtactgtgacaaataaccacacaggcctgggctcaggggggtggcctctcctgagctgggtggtcctgggcacggcacttcacctccaggtgatagctgcaatgggggaatctgagccagaaccctcaaagccacaggcctgcccaagagcctggaaacgagatttttaagtgctatcttctcatctttactgctgacagctaactcaataaaaaacaaataaatgaatgaaaccactgtacagatgaacaaacacatccgtgggccacgtccagtctgcaggtcacctctgtccttgggcagtggggcaccaaggtcagagcaaggcctctgggaccaggtggcctggagtcgaatcccagctcagctccttcccacctttgtccttggacaagtggcttaaccttcctttgcttctgtttccttgcctacaaaacggggatgatcattgttcccctcacagcgtggctgaaaagagtaagttgcaacgtgcttggaaccatgcctggcgcagggtaacgcacagcaaaataaatcagcatggccggccttcaagcagctcacagcagctcagataacgcacctcacaccccaaatttcaaaatgactctcccttctgcgaccacactgggaggctcaggcacctaaaattaaactcatctggcaaagaggcacttagtgttctctctcactgtcaactgtggcgtccttggatgaggcttttctctctgtataatttccaggatcccccatggccagggctcaggcatagaaggaggatctcagccctaagtggcctcatgagactcagcggccagccccccacatcagctgctggagcacccctgcactgtgcacacctggctctctcagtccacggggagggtatcagaaccactccaggaactgccgcctgagccctggcagcagctggtggttaataggaggggattatcgccttggccctgggatgggccccacaaaaggctccggctcagctccagctgctgctacaggtgcccagcagccctgatcagggcaggcagggccaggtggtctctagacacaaagtatgtaccacctgcatacccagcagttcgtaaattgctgggcctggaaagttaagttataggttgggctgtggccaacagaggcagaggacacagggccataaggcagaagagtgacacaagggggacctggagaacaattgtggcagcaatgccgagaaaggctttaaggcattgggccaagcatagctgggtaaggacacggtgaggggctttgggccctagcgtgtcagacttgcacccgaggttggactaggtccaagtcttcataggccctgggaatctggattttattctgtaggcaacaagcgatgcctaggaaggagcgtttgaatttgagaaaaagatttcaggatgcccagggggatgcggctggaagcaggcagaccagctggcctggaccctggtcctaagagcctatccccgctgggtcctaagagcccaggaccaggatctgggcccgagtattcaggaagctgagctggtgggagagaggcccaggtgtcaacccagggactctggcaatggaacctgaaacagcatggacttgagggcttggggaagaactccagtggcaaaaactctcatttcctaagagattgtccagatcagttctgagggtgcctccctcagacacacacatgtagtctgaatagctgctgcctccgggcctgcacggggtgactccagacagtgcagaccaaggcacccagcatggctgcccaagccagatcgcaatcttggcgtgccttccacgccctgtagtccccagtcacccgacccaaactcaggtctgctgtaagaaggtgaagaccctggggccccaggaaagggctcccacatgcctcctggaagcccagcaccacgcaagcagtcatcagcctctgcagaccaagattcagaggctgaggacaagctccccattcctgctgacccaaagccaagggcatctctgtctctctcaacctgaggagccggctcccttcagggtcccaccccgaggtgggacgcaagacgctctctagggaggagctccggccaacatcactgctggcctctaactgctcgttcttggactgtggccgtgaaggctcctcctgagcctgtgggggaagtgagctttatgagaccctggaggaaatgaagatctaccaaatgctcctggaggcaaactgcgactcctgctctcactcattgctcatctgcccacagctgaggcaggccctgggcagtgcacaaacagtggactccaggcccagctcaggccacagagcccggccttgcccaagcgctgctcagcgctcctgacaggaagcaggccaaggaggcgcagctgcacttgaccccaaatgccacgaacggtcacatccgcagctttaagggcaatggagctcagtacaaataatgtcaagaacaacccaattcagggcctttcaatcagtccttttcctttagttggagaaaaacgtaatcggctacaaacttggggactggtatatttaatggtatctaatggaatttaaaatatcctatagattgaagaactgttttcctctttaaagttttgttttttcctccaaatttcaacaaaaccaattttatacctggagttaaaaaaaacccacatcacaatatttttaaaagaacgacaattcctggaggacctctgggcaaggcccttcccaaggcacacaggctggcccaaggagaatacagtttaaacagcaattaggactctacctaatgcctgcagaaaacggcaggggatttttaatcccaggctgtctgaccacagccgtctgggggcagtgaccggagtcccagcctcaacacgttttcaagtggctgaaaagagatttctggaagagtgtcatctagcagcttctcacactgatacttggctcgcttccctaggggatgtttttgttcttctttaaaaaaagaagaagaaaagaaaaagttgggtttgaagaacttccacagaaagtgaataaagggtcataagccccagagagttttcttcagagcttcagaccctgagaaactgagttaggttcaaaagaaaaagtatctgacttgatctccgtgtacacctctctgtgcaactgccggcgagaagggcacaggggcacctgccgggcagggcgggggcctcgggaggggctgcccacaccggccgctctgccatctgctggtcatgtgcatgacttctgggaagtctgagctttgctttctgcttctgtcaaacaggtaaaaattcaaatccaccttagagaattgcacgagggataaaggcatggaaaccagcctcctaaactgcacatctgaacaaacacctggctggggagagcagtggcgtcagacctgctgtgctaagcagcgctgggtttggagcaaagcaggctacacatggggaggacaggcgtgggtgggtgggtgggtgaggagctgggagcaaggggtgttcccatcacgaagtcaaattgtttaagggccctgctaccctagacaccttgaataccgtttcctgggggcttgacaactcttccccataccccctgacctgtgaccccagccccattagattgcagaacacgacttgggattttaggttacatttcctattgtaggggtagaatgggggctcagcgagactgcacacgacacagagctcacaggccccctcccaccacggcactgccaggctccagaatgtgggaactgcctttaacttcccaccttacctcagttcatgaatgcctcccagatgcctgtgtgctagggctgggacacgcactggcctccttctggaggcctcagaagagctggcactacctttcctcattccagaccccaaaaggagcaacgtgttccttgctgctcctcagaggacacagggctgcctcaaaacacccagaaggatgagagttccatcagctttggtataatgagggcctgtttatttgacttagagacacataatggagttgtttcttctccataaaaaaaaaaaagttatagaaaaactggaaaatgcagaagggtgaaaggaagatactaacatttacccataatcctacctcccaaaggtggcctctttttcccacatggacttatctgacaacgtggcaagaatgggcctctgaaatgcctgtttctgagtgtttgccacctcatggaggttgggtgggttctcctgggccatgacacaatggtctctctggccacagagtaaaactggcttgcatcagcaggctggggaaagagggccccgcagaaagcaggcccacagccaagacagaagtgccatgtccccagggttacccacccccgtccattaggcagaaaggtcacaggtccttgggtgagctccagactccccaagagtgcaacaagtaccctgcatccccgcatcccctgagtgacgtgctagcagaggtaatgaggaaacacctgtttccaaccagcagcaacaatgagtgaagcaagctccagttaaaagtacactgttctggagctcatgctaactgtggggtcttcagaatgtacatatgtacttcctcagtctacgcccacactgtaggatccagacttgattccaggtgctgggtgggacagctctcctgccagtgtaacacccagatggtgattagtacaagatcagggcagcccaggtgggaggcaaaccagcataatcctgcaaacaaagactcaatctgaggataaaaatagatttttttaaaaaccaacaccactgcatacacacacgtcttgtgttagaaacttgactttcctaatagacactgtgcataggtgctcagttaactatcggagaacaaaccagctaaagcctggacacgtgcgtcagctgacagtacccggaacacggggaagcttccattctggggaatttccacttctcgaggatcccatcaatttcctcctctccaaatatttagtaaagaatttgtgcctttcatttccaaagaaagaggctttctccttatcccacgtctgggtttataatgctccctgctccccaaacttcctgaagttagaatcattcccagagtagcacagcagcaccgtgtgaggagtgctgagtcagaaaacaaatcttgtgggcctctcatcgtaaattgtgaaacgtttctggaaagcaatgcagcactgtcttcctaaattaaaaacgtacccaccttttgacttgacaattacttatctaggactttattttgtagagacacacaacagtgtatgtacatcattgcagcattaattttagctgcaaaatagctgcacactacttaaatgtcatttaaataaattacaatacagtcatgctagggaatattatgcagctgaatgtggcagtttcgcaggtgcaatacggaaagatgtcaccaacacactgttaagcagacagcagtgtgcactgcagctcccgtttgtgggtgcccatgtgaagagcacaatgaatttacccccccgcccctccacccccgggaagcggatggtgattgggatggagcaaaaagactttctattttcaccttccatgcctccatactgtgaattttgtttgctggaaacacatatttatgtaataataaattgtaaaaggcaaggattaggaaggcaggtgttctctgtcaaatacagccatggacaagtggtaaaaacccgctgcagggcccccatctgctcttggaggaaaatcagagcagaagttctggaagagctccagcctgggtctgcaaaagcatgtcctgggcctaccactcctgccaggtctccctctggggcacctgtcagcagggggccctgctggaccagccaggtaacaggtagggctaggaagactgaagaagcacttcaagtctctggtggagcccagctccagtactggttttgctgctaatctgtcctgtgctatgggccagccacagcctctgtgcaacaccaacacaggtctgcacagaccggctagtgatccaagaggccacctcctttcagaaggtcctgtttagagcactgctgtgcaaaactttctgctctgactgagatgatctgtctctgcactgtgtaaagggagccactagccacatgtgactagtaggcacttggaatgtggctagtgtgactgaggaatggaatctttaattttatttacttctgactgatttaggtgataatttaaatgctcccatgtgaccagtgcctcccatatgggacagcacagccctaggccctacacctcccctgcccaagtcaaggcctcctggactcatgggaggagttcccgtcctggcctgctccacaccggtgatctagaacccactgccaagcacctcccagatccccgcagcacagccctcatgccacctcacccctcccacccaacacactcacacccacaggtccctgtgtttctagatgcccagggccagtcagcccacccggagttctgcctacagttgcctcaggttgggcacacatgacccccagagaagctggagtgggcaggccccagactgacaggaagctcagccccagcagaggggcaacgaggcacaaggcagccagtgggggccgccgcagcctttccaacaaagggaggaacccacggtctaacgtgtctcatccgggcttgctcaccaggcaacatggtcacagccgccaatgttaagtggaaatccaaataattctggaacatgaaaactccacatataagacgtagcaagggtgaaaccaattccacaagccactggtgaaaacccatgctgtggactcacagatttctgcctcataccctcgggcaccacagctcatggctaactgaaaaccaagaaaatcatccgagggcacagagacaaggtgggaaatcactgcaagtgatgaagtgtgcccggagcagagaagggcctttgcaaggcaaaacggccaagcatccagagagcgccaccgacaactgactgcagtggtgggaattctgccagatgcagctacatgcccaccgtgcccagcgcgccctcgggctctcccctgtgttcgtgttatttgtgtgtgggaaaagcagactaactgtgaggagaggtgcacacttcactgagcccacccagggcctctgtcctttacagtcagagctgcaaagcagctgggagctatgcagacagaccttcttgcacacgccacctggcagtggcttaggggttgggccccccacccatgctgttagtaagaagatggtagccacaaatgaatcaagaaatgtccctggagcccgtcagctgcaaagagcagaaaatacgtgtgctaaagaataagcagactgtgacggagtccagatgagaccaatacatacagatcacacgccaagaacagcctggccctggccaggcgcggtggctcacgcctataaccccagcactttgggaggccaaggcgggtggatcacctgaggtcaggagttcaagaccagctgccaacatggtgaaaccccatctctactaaaaatacaaaaatcagctgggcgtggtggtgggtgcctgtaatcccagctacttgggaggctgaggcaggagaattgcttaaacccaagaggcagaggttgcagtgagccgagatcgtgccattacatgccagcctgggtgacagagcgagactccatctcaaaaaaaaaaaaaaaaaagaacagcctcctggtcccaaggtggacagaaagagccacacatacatgcctcacaacccccagccaccaaagaccaatgttgatggggacattaatatcagatacccaccagcacagactagagaaaagcacactgcacagttaaacagtaatgcacaaacgcatttttgtctgttttggtttgataatggccatgcagggtctgaccactgcactaaaggacacaacaaaaggacagggctctccaccccaatcgctacccgctcagactggtgtgggccgtccacgtaacatagactcgacctcctcacatcccagggccggcaccctcccttcacagtctccctgtaggagagcctttgtcattccaggactcaaatgtcccctacatcctgagtgtgaccccatgatggaactggtggcagcaggtgctgagtgtgaagcatcttaagccagagtcctaaatgcttcttcttgtacagatgctgctcccccagtgagaagatctctacctgggaccacgcaactccagacacattaaggacttacgggttttctgtggataaacttggaggcttaccaatatgcactactgattctgtggaaaagaagtagactgaatacattgcttgttaactgggatttcaaataccttgaatttcgggccttaccactcaatcacgtgtgtgtttgctagtgactcccttccatgttcataaatgcctcctttcatctgtcctgagcttttgctgcttgagcatcatggaatcagggagggtctcttcactgtggctggagctctggacccatcaccaagtccacactgccctatcaacaatcctgggtgactctatagcctgtgccattatataaaccaccctcagcccctaaggtctgtccactgtggctctcgggtccttctctgcacttcacccccgaactactgagatgaacccacaggcagaggcctgcggtgctgagctatgtccagagacagcaagcaggagcaggagttccagcagcccctgccttccagggatctttctcagttgttttaacatctggaattaaggaagtatcattattcctttatttttcacaatggcaaagagagtatttaagataatatatcaagacccaattttatctctctaaaataatttctgaagggcattatatcaggaaggttttaataggaaattctttgcttcatcagttcgttggaattcctgtcccagtagcattaatgaaggctttccaaagggcgttcccagctccagggggcgctgtcacaaacacaagatctagggtcttcagcgttgctttctgacttttatttttttctttctttttaacatttcttatagaaaccaggtctcactatgttgcccaggctggaactcctgggctcaagtgatcttcccaggggctgaggataacaggagtgggccacaacgcccagctgctttttgacttttgaagagaaaactactactacattgaagaaaaaaatcagaaaggaattgtactgtatttcctacagttacggtttatcttgttatcactcatttaatgtctctgccttccactgttcttgaggcatctaaagaatttggcacccgacttctccaatgaaaagtcacattgtgaccacgtgaccatgtctttgcaggttactatgggatcttcacaggcatcactgttagtggctgcactgtgtctgggtgagccgcatgcaccgaggcccttggggtggtccgagggacaccccagccactcacccacagacctggctgccacagtttacactgtttcctgaggggagtccaggagaagaagaaaaactactcatccctttgaggctcttgatacatttcacaaaattgcttttcaaaatggtcacacaatttacaatgccagcatttaaaaatatacattatatatttatattaacggtttttaaataaagcttatttgctttaatgtgagtttttgaaactgctagttaaatgatgatgtctcctggatcctgactggccccacatgtggtacgtgggacccacagcatcagcagctcccaggaactgcttagaaatgcagaatctcaggccccacctgggagctgctgagtcacaagatcctgggtgattcatctgcataacaaagtttaagaagcacttcaggaggggacgtctccaggatcctcacggtgtctggggagtggcccaaatccaccgcagatggccctgaagatgcctttgtacatcaaccatgggaaaacaggcctgagattcctcagtgctaattcaagaaacgaaaatagaaagtccaagaaagaactttccccatgttttctagactgccgacactgtgaagaagaaagaaaccaccttgcgggcggcatgttggtggcacgtgtggccctgtctctgcctcttccttgtggttgcacagccctgcgtggctgtgtgtcaagctcccccatgtcagccttggtgacttcttctcatgacaatgtcagagtggccatcttccaccatctgggctaacccatattcattttttttcaaattaaatctatttcatccaaaccttaaatttttatagaggcaagtgcttggcgggtctaagaagacttttccaaattatgaatatatgaacacactgccctagatcatctgctgaacgtttccttccctactgcaatatgatgcttctctcattcaagttctcagtcagtttcagagccttctattcccctacttgtaattacaacagttgggagacgttcacacattgacaggactggccttctaaaatccactgtaaaaaaatctgttcaattattcttacctatttttccctcagatgggacttttggaataatccgtcaagttagggggaaaatctcaagaaagtttggctggaataatggtagaccactaaattaacttgaaaattactatcctttcatcgataatatttcatcttcttctcctggaatatgggttttgttttcttggttccaactttatcaccccactcaagctgttgtgttacgttcacagaggtcacacgtaggtctcatccctaacaaggttctttattacctgcaaattagaacaattttgtcttcctttccaatattatcatcacacttctgttttgtatctcgtttcaaatgtctaaaaccacacgaaataacaatgaccatgggatgcaggaagctgtggacatgcctgatgtggaagaaccaagtaaaagctgattctcagctccatccccagctttgaatcaagtggaacatcatgttaaagaaagggcagtgcgtcgcctgccagcctctggaagtagggctgaggccagagcgtctgggttttcaaagggctttcaaggccacctgatctgggctgggcagctggtcgctggcttcccacaggagcctacagccgctcacaggggacagggcctctcacacggagcagggggctgctgccccagcaaatggcccatcaaaaacagcagaaggaggaaaccccacgaaggtaatagcctgacagaggcaagatagggaagcccagctaaagacacagggcctgtgcagcccgacacaggtacaaacatttcacacctcctaagatacccttcgtcaacacaaatgcaattatttttccaaatcagctaatggctatttaaaaacaagaaaagaaaagaaaggaaaaaagaaaagaaaagaaaggaaaaaagaaaaggaaaggagaggagaggagaggaaaggaaaggagaggagagaaagaaaacataagtgaaactgaatgaatgacaaacatgaaacaggaactccctggaccaatttctacagtaatatacactaaacagataaaggtaaaccagtgcttcatatgatcacatatatatctatgtaatccagtgtttatgttaatgctctataatgctttaccaaatgactagggtggcgcaggggaaggagaaggcagaagaggaaagaatgcaactgctccttaaaaacaccttcctaccatcattcactcaacaagcacagatacccgagtcaggctgcacaaaagcatcaggtgaggcaagaacatcgaacaggctgacagaacgcagccagacagttaagaaagacttgccaacacgcagaactcttctacactgtgtggtggacagaattattgctcctaattcctcacctctccttgtgctcccatatgtttaagacatgccaagacacggacctgttgctcactcctcacctctcctttctcacatcaccttgcagtcccttctccctggacacagtggactccctgccccttgactcaggctcagacacatcacttgatctggtcaatgaaatgctgacttgaaatgcccttttgtgcctctgttgtaactatgaagggcctctgccctggagggcgccagaaggaccacacatggaactgacctgagctcaacctgtagcaaagagtcaccaacccagttaaaaccagattgaggcagagccaccaaccgagaaagctcacatctgccaacctccagaagcatgagcaacaataaatgactgctgttgaaggccactgaatttttttttgaatgtttgttacgcagccttattatgacaatagctgactgatacaggtggcactccccgagagaatccataagtcatttaaagacagcctttccttctaagttcataaagaaatcagttacttaccaggctcaccttttttctttgaaccagacttcttcttggcaggagcctcttgctttggtgcctctgggctctgggccacatctgtatttctgccctggacagaagctgactctgtctttttaccctgattggcagctgcgtctgcctttttgccttggttgggggacccttctgcctttttgccttcactgggggacccttctgcttttttcccctggtttgtaataccctctacctttgtgccctgattagcaaccgaatctgcctttttgccctggatgggagctccctctccttttttgccttggttgggactcctttctgcctttttgccctgagccccttctgtctttttaccctgattctgggctccctctcctttttggccctggttctgggctccctcggcctttttgccctggttctgagccccctcggccttcttgccctggttctgggccccctcagccttcttgccctggttctgggccccttctacttttttgccctggttctgagcaccctcggccttcttgccctggttctgggccccctcggccttcttgccctggttctgggccccctcggccttcttgccctggttctgggccccctcggccttcttgccctggttctgggccccctcggcctttttgccctgattctgggccccctcggcctttttgccctggttctgggcaccctcagccttcttgccctggttctgggccccttctacttttttgccctggttctgagccccctcggcctttttgccctggttctgagccccctcagccttcttgccctgattctgggccccctcggccttcttgccctgattctgggccccctcggccttcttgccctgattctgggccccctcggccttcttgccctgattctgggccccctcggccttcttgccctggttctgggccccctctccctttttgccctgattctgggccccctctgcctttttgccctggttctgggccccttctacctttttggcctggttctgagccccctcggcctttctgccctgggttggggccccctccacctttttcccctggtttggggttgtatctacctttttaccctggttctgggccccctccgcctttttgccttggtttggggttccttctgcctttttgccttggtttggggttccctctgcctttttcccttggtttggggttccctctgtctttttgccctggtttggggttccctctgcctttctgccctggtttggggctccttcagcctttttgctttgattctgagtcccctccgcctttttgccctgagtagtgccagtggctggtgtgttgcccttggcacccactgggggcaccaccaccatcggcacctccttgggagcagtttccaagatggcagccttcgaagtgagaacctggatggaattcactacagagctgacagctggttccacttttgccacttttttctccttcttctttttgtccttgggggaggaggccagcttctcctggggcatggctggaactgtggcgacaggagcaacgataatggggggctgcactggggttggagccacagccacagcaggagcccgcactggttctcgaaggaggacagtcacattgggggctggatcatgatcaggtatcttcccattaggtttctcttcctttttcttggtctttcctttcttctccactgttttctccttctttttcttctcgactttctggtggtgagttttcgccatctccttgcgctggttggctagggcttcttcatatgacgtttccttcatggagaaagtcgacaccaggaagatgccaatggcagaaacaaccatgaatcctccaaagaccacaacccccaaggtttgagtgtcgtaaatatccatcctggcttgctttcctttcacctgtcaaacatacatggaggttactatttatagaaatcaaggccttcaacagtttctatccccaccctaccaccaaacttcaggtttcactaattctttcttcaggctaataaattcagagaagaaacaaacccaggcactctctgatgtcccacattctcacctgctcctctttaggagtgagcgattcgtacccaaggcatgagcagtccccatacaaagcaacagcagagtcagagcagagtggaggcctatctctggagcacacacgcccaggagcctcagcagccatgaccctgatgcaagatattccccacccaaggtcaaagatgcacaggagcacaaacacaggccaggtgtgagaccatggggagtggtggagactgtagtaaaaacacccgcccccacctaaaattagacagtgacactctgtcatggccgattgccctagaaatgtgattgctgagttggaagatgttttgatttttcatgttaggccagacacttttaaaaaatttttctctcaacgtgaaattgactgatttaaaaaatatgtgaaccgaaccaaaccaaacacatctgcaggctttcagccacaagcattttagccagcaggcccacagtgtgccatctccactctgttgtttccctcttccccagtgccaataaatgctgctacccaggatcagagataaaaacttctgcattacaatcctgaaacgtgttcaaaaattcagtgagggaaaatagccttttgccagcaatagctcctgaggagttatggagcctgcaatttgcatgttgggaaacaggaagaatcagtcttgggaggcccagaagatgccaggtttggaatttcacatccagaagctgcacagagggtgaggagacagtgtcagcaggcccctctgtcagacaacactccccaaaccataagaatgaacaacaccattctcactgcctatggaccaaagtccaatgggtcagaggcatccaggttcatacaccttcctgccacagcccgggctaagttcgacttcactgaggaactccaggaggtgtatttatttggatacattcaagccagtcccgagtctctctaaagaagatcgatggaatgagcaaagagaacacaagggtaagaaggggtggttaaggggaggtaaaaggaggtggaagaggagaggaggggaagtggacaggcctcccccagcattgccctgcaaaacctctagatgctgtgggagactgggtccaggctgcttagtggctcagatactgagattcttctcctaagacattgagatccccactcctcttgagtggttatagaggaaggaaacagagtaggaatcaaatccaaattttgacatgagggcattttaaagaagggactgagaagggagactgttttcaatgtcttggcattgtgttctaagaaaaatcactctcggccgggcgcggtggctcacgcctgtaatcccagcactttgggaggccaaggcaggcagatcacgaggtcaggagatcgagaccatcctggctaacacggtgaaaccctgactctactaaaaatacaaaaaacttagccaggcgtggcggcgggtgcctgtagtccaggctactcgggaggctgaggcaggagaatgggatgaacctgggaggtggagcttgcagtgagccaagatcgcgccactgcactctagcctgggcgacagagcgagactccgtctcaaaaaaaaaattttcaaaaaaaaaaaaatcactctcatcacagaaggaacacattactttgacctttctaagaccttcacaagaagagggtttaaaacactcatgacgaagaaacttcctagcatatgctctccctggggacaactctatcagctgctgtggcaacacacttctcccacactgtcactcggcgttgagcgagactgagtcacacttttcattccagtcttaacctctacaaagtcttaggggagctcatggaggcctttgaatcctgggtaaggcagcatttatatttccaaatgggttctgacctctggccgtgggcagtgacagtgtgatccacagccagggcactctcacgtttgatcatcgagggaggataccaggaactggccttccgagaacacactctcaagctgggtgttaaaaaggaaatcgcaccctgctcagccatggatggattcagtgggtaggaggatggggacaagaaggtctggaacatggtacagtcaaccctcactttttggcaggtacccaccaaccaaaactcctctgggtacttacaagatttctcagaactctgccaaaatggacaccacattataatcactacattcaaaaatcctaaggccaggcatggtggtacaagcctgtgatcttagcaccttgggaagctgaggagggaggatcgcttgagctctggagttcaaggccaacccaggcaacatagtgagaccccatctctatttaaaaaaaaataaaaaatcctctaaaacactccccttctctagagaaacgaacattaggggcctgggtcaccctcactgaggctccataaaccccgaatcgtttcccaacaaccatgtgctcgaggggtggtctttaccgagtcgcgattggcactggttgcagaccgtgacacagtgaacagccacgcacaaagcggggcctgttcacagccgaggactgtggggctctgtgcagccttgtggtttccaacttctaaactccagcagaaaagccaaggctggaaaatgaacttttaatcttactcaacataggcaaacacagaatacaaaaacatattctctgttgggacccagaatcgagaaaaacaaactcgggagaatatttttcctttgcaacgcacacaaatatatgttttatagcagcacaaatgtgtcttcccaacttttgcagaaaaagaaattacatccccaccactaattcccaagttagaattttttaaaagaaatctttcacaagaaaatgaaaagccctagtcttaagtagtaatacactgaaacatttaaggctaaggcaataccaccacggacagcaaagaaatcgaaatgaaaaacaacctttctgctgctttgcagagtcagcttcagtgaggcgtaaacatcatgctgggagatccctgattcacagaaatgatgaagccagggatgcctctcaaattcggttctcacaatcagcattccgggagatttgctcctgaaatccacaccatgataagaggcccccaacagaaacctcttctagggcttcctccactgcaccagagttagggcagatgtgtgcccacccataccttgtagggtctgaccacagggatctatattctgtcaattccagaaacttctgtcaaatacgtacttttactccctgcagtggtcctcccttatcctctgggaaacttcccaacacccccagtgggtctgaaactgcagtaatactgaatcctatatacactatttttttcctatacctacatacctatgatgaaatttaatttagaaattagccacagtacgagattaacaataataaaatagaacaattataaccatatgctagcatcaccactcttgcactttggggccatgattaagtaaagtaagggtgactcaaacacacgcactgtgataccagacagtggatctgaaagctgagagggccaccaagtgacgcacaggcaggtaacacagacggcgtgaatccactgcacacgggatcgttcacatcccaggcaagacgctactcagaatggcatgcaacttaaaactcaggaagagtttctttctgaaattttccatttaatattgtcagaccacagctttctgctggtaactgaaaccacaaagagtgaaaccatagataaagggggactacgatattgctaacatactcagactgtaagacaaaaagatgaaggccccaagagggaaggatgtaggaggctgcgcagaggctggacagactgaactcactggcccacctctaagatcttgagagaatggctcttcttctgttcttaagattcggggaacaaaagtaagaggaagccccaaactctttagacacagaagatatctgctaattcacatggcccggccaagccagttgggtccaatttggcagctgggattttggtaggttttgtgaaaagaccctcaacagctcccaggactctgtctcattactaagcagcagctccacgggggaccgtgtgtggaagcttggagaagctgtggggtaggggtggacaaagaaaaccaacccccagatccatttcctgggcataaggtgacctgctaggaaggtacagaactaaaacagaatgacaataaaacagagaccctagcagacatggctacatcagaatcaacagctcctaatttttaaaatattatgaaatgactcatacaaaagactaaaaagaaaaatatgaacatccattagcctaccacccaggtttaccaaaccctaacattttgccatatgcactttagatatttatttatatatatatgtatgtgcctgtgtatacatatatatgtgggggggggacacacacacatgtgtatatgtatatatatgtcatctcccttctagagggggacaacaccctgaatgggccacttaccacttccacctgcttttgcttctattacatgtatctatctctaccaacaaaatacagccgttactttgtgtgttggtaattgctgtgtaagtgacattgttctgggtgctatttggtaacattttttgactaaactttgtgagaatattcatatagatacacatagctttggtttattctttttgtttttttgagacaaagtctctctctgttgcccaggctggagctcagtggcatgatcctggctcactgcaacctctgcctctcaggttcaagccattcttgtgcctcaggctcccgagtagctgggattacaggcgtgtgtcaccacgcccagctaatttttgtagtttttagtagagacggggtttcaccatattggccaggctggggtttatttattttcactcctatattacatagttgaaccacaaattattagccatactcctatgcttttaggttttaaaaatttatgctgtcacacaaaattgtagtgtgacatgtctaccatatgagtgaaaaatctcctttatacccctgaagccagccacccagggtcgcttcctggagataaccattgtgacagaagtcattttactgtttataagttattttcttcaaaagactttggtaatgcatttcaaagtcaggttttcaattaccaggaatttactttggtatgtgacaggaaacagtgataaaactttccccatcagtttaattacccagcaccatttcctgactggtcttttccttcccccacagactcagatggccatttctgtgccattcagtggatctgtttctagattctacactttgttccactgttatatttatgccctgcatcaatgccacattttcagcttaagcatcccctacaaaatttctactggaatttgcatttgaatcacactgagtttatacatgaacgtaggaaggattgatatttctaactatagaagctatctgtcaatgaatatggtatgctagagcactacactgatttaaatgttttcttcgaagccaggcacagtggttcgtgtctgtagtccaagctacttggggggctgaggcaggagttcacttgagtcttggagttgaacaccagcctgagcatcatagcaagaccctgtctcttaaaaaaaaaaaaaaagttttcttccatacttctataagattttaatgattttctccataaaagtcttacacgttgttttgttgatggttagaataccttttgtaaactacttcttctactcctcagctacagacaaccagcaaagtaattcatttctgcatatgtataatttacccagctatcatctatgttcttgtcaaatctaggagtttgtagattctttctgattttttttaataaaaagtaagctgtggaaaaaaagacagtattgtttcttgctttccaaaccatatgatctcatttctttttcttggcttaacagagctggctgagaactctgatgcagtgctgagcagagtctgtgcaataagctgccttgtagcattcgcaagttactacttctaatgttttactaccagtgtcgtaccaactgcaggtttctggcagaaatctttcctcaggttaagtagcatgtcttatattcctagttatctttttaatataattgagtattagattttaccaattgcagttgacattttctcctttaatctgaagtatgtggaattacagtaatgcacagtctaataatgccagttcacagaaagtttctatggtataaatgtttcttgatggagattcttttctaacacatcactagatttggtttgttaacatttttatgtgagatttctatgtgtattttaaaatgagaaaaatcagaggtgattctcagactgttttctgatcttggtattagggtctcttgagtctcatagaataagctaaaaatcattccttttcccctattctttggcatagtttgtgtacaggtagggttttctgttctttgtagatctggaagaacttgcccataaaaccatcaggattagtgttctgagatcttttcttaaagggggaaggctggctagagtgctgatttttaacaatttcgatacaatttaacaacatcaatttcaatgatgattctaggaccagctgctggctttctgatccaatctataaaattaatattcattattccttcctccatcttccactggtttattctgtcttttctaactttctgacacggccatttatcaactttcagtcctttctcttttcttgcagcaaatatttaaggcaataaatttccccctaagtactgctacggcttcatcctacaagctgtgatgctaacacatcttcctaacatccatacgtgactgaatttcatgaatgtctccagctgcctccccagtggtcaaaccacctacaaggtcttaggtctgctgcccttccccatgacatgagcccccatcacacacacatctggactagtcagtgttgtttggttccggatagctgacacttgcttgtttacccaaatgctggccatctgctcatcactgctacttgcatctcattcctttttttagggtcttgccaaagtacatccttgagtagttctttcagcaaggatctcttcttcataaactttctcagtccttaaagccctgagaaaatttacttcaccttcatggattaactgaggacagaattccatgctgacagttttctctcaccatgttgaagatgttatttcacttgtcttccggcattttcttgatgagatgtttagaaacacactgtcagtctatttgttattcctttataatatctttttaatctctcattacttttaagatccatttctggggttctaaggattcagcaaaatgtttgtaagtgtatatttaacttattcagactcactgtgctgagtgtgaggagttatgttattcttcaattctggaaaatccttggccacacagttcttcgaaaatggcctgctccctattccttcctggtagagctcctaattagacctcaatctctttgtgctaccatttggataactcgttagacctacactccagtcttcagctgaatctcaccagctctataatcagtccttcgttattcgatttgttttttaagtctgactggcttttctatttttcattgtcttcttttctacctctaacagtgatttgatattatatctttgtggggctttatcactggtaaaccttaatgggctgagttgtgggcctgcctctaatgagctgttttatctttgcttcaactagggcctcagggaagaccagccagggactaacttttacaagaggcatggtctcctcttacaaattatcaggagactgtgtctcccttgcccaggacaaaacagataaattcttacctgtcatctccccttgcgactactgggcaggtgttctttctagtctgtcctcccatggagggtacagcccttcaagggttcaagtcttacaggtggatgtgagagaaggctcagttcccattcccagtctcagacaaaatcccattccccctggacattaaagccaaagactcagatgactttgaccgataataccgcacccctacccctgtcccagggtcagctcactgcaggtcccagtcactcgctgcaaccttggcttatgaactctggtcatctctttccctaccttgtgaatgcactactatgcattttaaagactgcttactaactatgtaacatttctaagtgttggagaagtgggtttcagatcagttgacctaaaattttaagtgcaatctctgattttttttttaacccaaagaaactaagagaaaatgcagtaacaaagagtccgaaaaaatttatttcatttctaagaggatacatataatggactccctattttaaagaaacaatgttactcattttaaagaagagttgaaacactaaaaatagaaatgtactctattataagcctttgcttattcatcagccatttcagattcaatttctatgcctgaggggggtaaaaaataaagaattgacaatttctggtgtctttccaaataacagtctttggaaagtaggtacttaaacagacctaaatcttctgcgaacttccaagaagcctacgggcttcaccttattgaggaagacagcatgcctatgcggtaggaatcaagaactgatgtctcaaaatggacatgaacagttaagatgtgctagcccacaagggagttcttactgccgtaaacatttgtctcccaaaagcaggggtcagtgtcatctatactgtatcaaatcaaacctcaccacatcaaatatggtaagtgatgaatcaatcgtctactcaatatcatatcagcatcgtatgtgctaatgtataccattataaggatcaaatctaaacagaacaacccaagtttccagatgggaaataatacacaccatggagtcttacacgttttcagagttacttcttagtttttcatagttttcacactcttacaaatggtagctctgaagtttcgttttctgcttgttgctggtatacggaaacgtaactgattccagcagggtgatttttcccccacagcaacttgcctaattctagtaacacatctgtcgattaaaaagaaaaaaattctacatatataagcatatgaatcacagttttgtttctttcttcccaatttcctatcgtctgcttaattcttcttgaatttttgcacagggcaggaccttcaacacagtgctaaagagaaggaatgacagcaagtattctgtttttctcatatcaaagggaaagatttaggtgtctctctttagtgtgagatttactaaagcctttttgcagacatcctttatcaggataaagaggttgctttcttattcctagtttacataaatagatgttgaattttatcaaatactttatctgtatctattaagataatcatactattctactcctataacccgtaggtgtggaaggtgaatataaacttatttttaaacgttaaaccaagtttgaattcctaggataaaacgatttagtcatacatactgctggactttgtttatcttttcaggtatgagatctgactgatggttttctttcctcctaccattcttgtcaagttttgtaacaaggttggctggcatcaaaatgagtagtgtaggattcttttttttttttcattgtttctactttttagcaattacctttaaaaaaaaaaaaacagtaacacacagcactcacaaaattcaaagttaaacaaatctttacccccccaaattaattctattatcccttccaacttagatgttactgttttcatgtatttaatcttatccttgttccagcctctccaacattattcttttacatgtatttagaactgtccaaatatttaccactttctttactcatcattgcttgttatgtctttttccacttgccatcaccttccttccaagaatatccttgagaagttcctttagcaaagatctgtcagtagctatcttgggtttttgtcttaaaacaatcttttcactctcactgttgaatttttcccttgagttgctgtatcactaaatgtctatatgtggatttatttttatttacccggcttgggttttggttgggtgtcttacgcattccgcaaaattctcagtcattagcttttcaagtactggctctgtcctcgctcctctcctggaaccccaattagacacacttctgcatctactcttcctgaatcttaattggtcttacaaattattcatctatgtggttctctaaattatatttcttcttctctactttccaggtcattcactctcttcagttttatgtaatctgctagtaaatccatctgttagatttttattataaagacatgaacttttcatgtctacaagttgttcctggttcctttttcaaatttgctaggtcattgtatagtttcctcttcctcataggtattttcaatcttgcctatttagtttgagtaaggcctttaaaatctatgtcaacaagtccattatcttatgttttctgagatctcttcctgctggtcctcattcagtgctatttcatcctttgcatttagttgttcctaactatggactattctctttcgtttgataattacaactggggatttggtgagcctaggataaaggtgcagtccttcaatgatctgctcgcccctggactgacccaggaacactaggtgtgcaggtccactctcaaataaagaatcttcaaatcagcttggagtttcccactactcaagtcatgggatccacatgagggacaacttgtgatatccacttctcagaatgtgcccctccctaccctgcctgtagggtgagaatgggcttacctctgactccccttctccatgaaggtgtcatggccccttgtggttccaactcagggagcctgtgtcctatcatgctgccagcattaatctctgccccctgcgcctggagatgctatcagaacttaagagtttgcctattttgccaaaggcccccggggttgtccttatcctcttgggtcactcctttcaccacctgcttcagtgtattccattctaggcttgtcagaaggtatttttaatgtcatttacctcttgtccaggccatccagcaagttagaagaccggttcaggccacccagcctattctatcaccagaaacccagtgttgtcgcccccaacagccaaaccaaattccagccaaccatgctcttcaaagaaaagggagcacgtggctgccatgtgccaggaggctggctgtgccagggagactactaccaactctggacctggatataccatccttcattactaggtgggccagggaggaagggctcctgcaggaatatcccgacactgccaacccctagaggtgggcagagcttctaattagaaacacatgggccagagctaaatgaggtctgatacccaactattggttcgtttttaggaaattcactctgtaggggaagagttctgatgaagaattcaatctcaagatatgagcttcgttgaattcccttccattaactccttggagaagagctgcatttccactcaggtttatattaggaaatatcacctgctcatcagcaataaaatctgaccctcacaagcccttttcccaaggcccacctttgattaacgaattctgccagcctaacatcctctctctgtgacagcggagaacttcagcctgagtgagtcatttcttatttattatcaacggtaactcaaaattcattttggttcccttttagaatcagccactttataatatattccaaggtctcattcatatactgttggtgggagtataaattagaacaagcacttcagacaaaaagtctggcactttcttttaaagccgagcacctacctccttctggtcctgcaattctactcctaggtatacagacccaatggaaatgtgtatagacattcaccaaaagtctgcggcattaatagccccaaactggaaactctccaagtacccacctacagtaatgtgaataaactcatatattcacatgctggaatagtgagaatgaacaaactacaattaccccaacaacctgacaagtcttacacgtaacgttgagtgaaagacacaaaagagcatatgccgtttgagtccatttacatcaagttcaaacacaagcaaaatcaatcactggtattattaagaagagagcaggtattccctgcccacgatgggcagcagctggaagaggggcacagaaggaggttggggaggtcaggaataatctatttcttgatctgctggttaaacaggcatgtttagcttgtggatacttattgcgtagactcgtgatagtgcatttttctgtatatattttactttaataaagagtttaaaatgtgtgtcatatttccttggaaaacgcgccccacagatcctggaggaggagcatctttaaggcctgaagaatctgttatggagccctgttactactgccacttcccagtgctcacacccacacaggatcgctcccttcacagacaggaagtaactgaggccagggtcaaggcaggcagtcacctcctgacctgacagggcagtgactcagtgggacccacagccctttatagtcctgtggccatgccaccttgctgtcctgaagtctttcttttttcttttttttgtgatggagtctcactttgtcgcccaggctggagtgcagtggtacgatcccggctcactgcaacctccgcctcccgggttcaattgattctcctgcctcagcctcccaagtagctgcgattacaggcatgtgccaccatgtccagctagtttttgtatttttagtagagacagggtttcaccatgttggccaggctggtctcgacctcctgacctcaggtgatctgcccgccttagcctcccaaagtgctgggactacaggctgagccaccatgcccggcccacctgcagtctttttaaaatcaaactgtacagaataagtctccagatcttccaacttaagagggatatgacttaagatggaaaagactaacttagcttcagagcagtggctaaagttgaccttttaagagtcctttgacacattaccaataagacttttttcattaagagtctcaataattcatttattcttcagcattgactccttcctcccctcaatcactgtgattactattctgaaaattaagactttcctttctaattactacaaatacctagaactaccaaggaaataaaaatgtattcataaaactaaagctacatctaattcctattcaggatcagacttaattaaaaaccaatttaatgcagttgagttgcacactttaatcactgaatgagaacttcaaaaaaacacaccacctgggtttgaacaagggtctttcacctttccaagtaaaatgagtaggtcagacattcccgttagaaagggctagaaatctagtatctactcttcttcacctaaaatcaacaggagagaagaggagaaacaaaggatggggctggacgtagtattgcctcttcccaaccagaccaccctgcctcagccattgctcctcctacttagtggactgccacacaaaattcctctgagaaaagaacatcaccatgaggtgaggcaggagaggaaccttgacccctccctcacttcctagcacgatgaggactgaccaagagaaaacaaaatgtaatgccaactataagaattctcccggccaggctcggtggctcaagcctgtaatcccagcactttgggaggccgaggcaggtggatcacgaggtcaggagatcgagaccatcctggctaacatggtgaaaccccgtctctactaaaaaaaatacaaaaaaatagctgggcttggtggtgggcgcctgtagtccagcaggagggtgaggcaggagaatggcatgaacctgagggcagagcttgcagtgagctgagatgcaccactgcactccagcctgggagacagagcgagactccctctcaaaaaaaaagaattctcccttctccccctaaggaacattcttgcccactaaacacaaaatctacctcttttcagagcagccagcacactgttcacacccaaaacaaatgttctgtttcctggtgagtgtgtcgtcactgaaatgctcagtgactctgcaaggcccacctcacactcattggttatacaaggaattaaaggatgctcacagccaagtctcctccccagaactggtgcaagcacctgggaagggcccagttctgtcaaggtgccatgcatgatggactcccagagacactgggatgaatctaaccaggctggagactgagggctcccaggagagagccaacatccacatcgtctcctaaggttcacttcaaaccccagcctccgctggaagggcaggatgtccacatttaacagtgccctctgcatgtgactgtcaatttctcaactggaggcaggctggaggtaatccaaacttcacttgcatttggctctggaatatgtttttgtgtttatatgtgatgctctaggaatccagactccttcaggctacatgatatactcgcagaacgccagtgctacaaaatcatctccattagctcagcaagaatgggcacctattgcatgctagtcactgccctcgacactggatatacctcaggaaacaaaagctacatccctgcactggtagagcttacgcttcagagggggagatgacaaagtcagtcaaatacgggacatgtcagggggtgatgaagagaaagtgatgcagagaaggggggcagggagtgggggtgggagagcgtcagaggctgacactccacacagggtagccaacaggcctgaaggagatgagggagccagccatgtgccatctaaggaaaagctcttagggatatgccaaagtagacgcaaaggcccggaggcagaagcatgcctgaggaacagaggccaccgtggctgcagcagaggacagggagatggtaggagtgaagctagagcgaaagtgccctgagaggccactggagaccttgaccaaggagggtcttgaacagaggagtgacatggtctgctctggcaacagactagaaggcagggggtataggcaaaggcagggagcccaccagaggctagagaaataacccggggcagaggtgagagcaggctgggcatgctggctcacgcctacaatcctggcactttgggtggccaaggcaggaggactcctttagcccaggagttcaagactagcctgggcaacgtggcaagacaccatttctacaaaaaaacctaaaaattcactgggtgtggtagcatgcacttgtggtaccagctacccaggaggctgaggcaggaggattaactgagcctgcaatgttgtaactgcagtgagcagtgattgcgccactgtactccagcctgggtgatagaacaagaccctctcagaaataaaaaatcaaaaggtaagagctgtttggaccagggagaaggcagaagtggtgagaatggtcacactggctctgtctggaaggtagagctgatgggacctgctgcgtacagggtacaggtatgagacggcgaggagttaaggataaaccgaggtttgtggcctgaaaggtggagctagctggcctagtttcattttataggagggagaaaactgaagcccagggaggagaagtcatgtccaaagtcactcactcactccagggatcagaacacccaaccagtgcttctcccactgctccacacagcagctccgtgggacaagctgatgactagtccggtcacaccggacagcccccagcaccctgagggactgccaatacccaagcacataacatatattggggtaggatgctgggcactgagagcacaggcccagcttagagaggacaaacacagtccacggctgccacacaagaaagtcaacctagtgtagccagaaattcccattttcccccagagaacccaaaaatctagattttgtttttgttttttattatgagacagagtctcactctgtcgcctaggctggagtgtagtatgatcttggctcactgcaacctccaccttccaggttcaaatgattctcctgcttcagccacctgagtagccaggactacaggcacatgccaccatgcctggctagtttttgcattctttatagagatggggttttgccatgttgcccaggctggtctcaaactcctgggctcaagcgatccacccgccttggcctcccaaagtgctgggattacagggattagccactgtgcccagcccaaaaaatctagattttagtgaaaaaaaaaaaaaaaattccacttttaaaaggtgactcaattgcttaataacatgaggtcagtgaaacaaattccatgtgaaggccaagttcagctcacacagggcaccagtttggaattcctctcaagacagcctaacagaccttgtttgcttataccctaacagaccttgtttgcttataccttgcccaggatagagaattaaagatttgaattcaagatggtcttttattccaacttttgagtcagcagatgatattcattatcactataaatagtctgtaacttccagtagtcttagtgggcctcctttctgaccagaaagagatcaagtagctgtccatcattcagcttcttcctttaaagttaaactttggttttatattattctttacagagtactaatactaagatgagcccacaagtacaaccaagaattcaaaaattattccccagtactgcccaatgatcctttcgaagttatatggaggccgggcacggtggctcatgcctataatcctagcactttgggaggccgaggagggcagatcacctgaggtcaggacttctagaccagcctgactaacatggtgaaaccccgtctctactaaaaatacaaaattagccgggtgtggtggcgcatgcctgtaatcccagctacttgggaggctgaggcagaagaatcacttgaacccgggaggtagaagttgcagtaaaccaagatcacgccattggactccagcctgggcaacaagagcgaaactttgtctcaaaaaaaaagagaaaaaagaaaaagaaaaaaaagttatatggagaataacagagctgtgtaaatagtcactggtgtaggaagcaatttatgccacccaagaacactggaactccaatactttggaactgaaaaggtttcgggactgggcaggtattctagtcttgccaaaaaaatctaagttagaaatcacaaaatgttcttgataagttaaagttgctgcccattgttgacaggtggaagacacatgttactgaatgcacataaaggacacacacgtctggttttgggggtgtctggttgtctgcttcaggagactcggccagaatttgtctgcctaagaaaagtctcctaggaggcccctgaactaattttctatatgctaagtgagagtgcctccttgcctaggcactgtcacttaaaattaaatatttaccttcccttacaagccatcactttctacctaatatcaatttattttctgtctttgttacaagtcaccattttgatgctgagggcattgggtaaaaaatctctccaggaaagggccactatctgtgtggcccccctcccactcctttttcttggaatgcagtttacaatgcacacaaagaggcgggactaatgctttctcagggtgagatcttatcaggtgaagtgtatcaactgccactagtcaactggttttgacctacagaatgggcaatttcatgtggttcaacatattaccacatgatcaagaggaacagggacatgaatgtttacagaataccagctgcctctacatcagcactgtctagaactttctgtgatggtggaaaccatctacagccacgctgaccaacttatgactactgagcacctgaaatgtggctaatttgactcagaaattgaatttttaattttacttaatttgaattgttttaaacttaaattgctacttgtggctactgtattggacaacacagttctagacagtagctttttcaggcaagaactaggtctcacttgcggtgtttgaaggcccaccacacaggagaccctcggtgaaaaaaatgaaatgaaaaataccttcagcactgccagattttcaaaatgcctccccaccttcctgccactgaagctcttaattttgatcttcacgttctgtgtcctcccttgggtaattattgccccaggaaggtggaggtatatagccaggagggaacatttggaaggccgggcccacatcgcctagcaactgggcaacaggaactggcctgacaaccttctgaccagctggacctccacattctcatccactgaatgggtgacaaccattcccaccccctagaacagggttattttaaggcctaaatgtaaaccacagttgtggaatctgattctaaaaagtgaaccttaaaaaccaagttgggctaagcttcatttatccaatgagacagctgggaatagtttaacaggtatgggggcgctgtccgcctggtataaccaatatttatgatgttataggccaggccttaaccactgcaggcccagcatgcacagacggacagcacagtccctgccttcatcattctgacttgaccattatttttgtttctcctgaaacaagattttagcaaagaaaaacttgctgtctcaacagaactgttgatcctctatgtgtcattcatctattagttaaaattcccagggctaaaaagacaagaagagtctggggtcccgacacttttaaaaggtgtccctgctacataataaatcaatactccaattcaatcactggcattcaaccatttaaactgagtttgctgctatgtaattattgcagcctgttgagttagggctcatttcattaaagagcataattgctcaaatgtgacttgatttaagatttatttaaaactcttccatcaccaaaaaatactcatataccatgaaccactgtaacttcttaatctctctgtaaatgttcagaggcagattcctaagtatgaaaggtgagagttgttatagtgcctagagctctaaaccctctcctaaaccccaagatccctttctggtttcccctcccccaaccttagcctcctccaggcctccactggcccaagatccctgcaagccggctttgcggtgctccatgtaaaaggaaaacttcacctactaggaggtctgccccggcctttgcttcaacagagagggaaatggcacctccaggacctcagaaccggaagcttctttctggaagggaaagaggttggcatatgatagtgggagtgacctttggcaagttcgtaaacgagtcaagacatcacacagtaagtgacatgctgcagggtcacagatttctctaggtgtcggattaacaggaagttaaatcaaacaaggagtgtgaggagggaggcggggcagtgggagaatgccccccagctgcacagggcggggtaacattcgcagttgttcttcctgggagtgccagacagacgtcctgggtctctggggacacccagttctgaagaggtatctaatgtgagatatgaggccctaccaggcccatttctccaaattcctgaaaatgccatccagatggcccctaccctgaaggttccagcacgcagagtgaatagctgagcagtgacgtgggaggctcctcaggtccctcagagtttcatttccttggtgcttcccagtctctcctaacctctgacctctcagagtaattgccaaattgccttctgtttgtacaaggtcccagcacttcccggcgtggttcccgaccctgtgagtgggtggtgctgtcttcaggccacagataagaaactaggattcagaggggctatgggacctgcgagtaggcggccagtacgtggtccggggtgtagaaccccggctgtgcaacttctgcagccccgcgcccgccgcagtgccggagccaggccccaccttcctcccgtgtccagcaccccccaacaaaagcatcccaactgaacagccaacacttgtggctccttcctacaagtgctgggtctccacagctttcctcgcaaatcgaagctaacaggagccccgatttgcagaccaggaaatggagaccccgaacgaaacaacttggtcggggtcaccctcgccagccggggcactctagagctaaaactcgcgacttatcattcggagaggggtccctgaagcactgcgggcgccccactggaagcgcagaccccggcctgcctcccctaatcagggcgcagcgggagagccggccgggccggggcgggcaccaggccgggtgccagcgcgcttggccggcccggaggtgtccgcttccgcccggggctggcaccgccggcccattcatcgtggccgcgggcggggcgggccgggccccgggcgccctcgtccccccgccgggagccctcgagccaggctccgcgcagcccagccggggaaacggtggccccggccccgccgccagggggagcagggagccgcctcccgcactccgggaagttgccaccgcggccgcccggcgtccgtgccatggacagacccggtccctgcgccgcgagccctgcggccccggcccgccccgtcgggggccgtcccagccccgcgaagcgccagcgggccgcggcccgggaccggcgcgctcggcccgtgggcccccattcaatcccgccctcctcccctcggccggcctccgccgccttccgcccgcaccccacccctccggcccggactccagcccggcaacgtcatccggcggcttcccgaaacttaaccccttcctccgccagctgtgcgccgccccgccccgccccgccgccaactttcttcgcccaacttcggagcgcgctggccggcccgacggccctgccgggagggagggaggcagggagcggtcgccacgtcgcgcccgtctgccgccgcagctccccggacggcgagggccgcggggtccacaccacggggcgcgccctgcctacgccccggtacggcgcttgcccggcacccccgccccgagtccgaccccgaccccgatggtgcacggccgcggcggcaggcggcgggcggcgggcgggccgggggaggggccgccgaggagacgtgtcactcgcggcgcagcgcggccggccccggccccccgacggcccggcccgcgcgcggccgctgcagggcccggccaagtttcttacctgcagccagagacgcgagagggaaagcgagagggcaggagccgccgccttcgcagccgccgcggagccgggagagaggagccggccaagcctccgccaagaaaccgcccccgagcagctgtagacgctgcgaccctgacgccgcccgccccgtctgccgtccgctccggccgctcgctggctgcgtgcgcgcgtgtggagtcgtggcactttctgcctcagagctggcgaacggccccctccgccgggatcgccgcctcctgccttccccacccgggccagccattcatcgagccgcctcttcccattggtccgcaccccgccactctgccggtcgctggccagtcaggacgcgggtggccgagccgcggcggcggccattgggcagagaggagggtctccacctcggccaatgggagaggggaggagctgcggggaggtgaagggggcagggctggggagaggcggggccgagcggcgcggcgctcggccgtgcgcggggcggggcggagcaggaacgccccgcccaccgaggggggggtctccggccagctccgcccactctgggcccgcggcgctcccagcagtctctgactaggatccggctctgcctaggcgggaagcagaaggttcgggtcccggcgaccccgggcctgcgcctctggataccgctgggctgacatggcggtggctgaacagggttgcgcaaccgcgaacagccaaggaagctgctttatttaaacccaactaacttcccccgaagcagcgccccctcgggccgccgggtatgaggacaagctctgctgggggtcagcccagggagagcaagttcttatcatcaaagagattgcaatcagcaccagaaggaatttccttcagtaaatggaggaattggggtggaagagccagaaggtgcacgaggaattgaagcggatgtcatcgccctcgttgttagggagggtacaactgaggcacggtctatttaagatactcaaccaaatcacagccggcagagcaataattacaatccactctgtggcgttttattccatgcgttggggaaggtgagaggttctaacctaagaaaactcatccgtgtcccacaaaacggagcaactggtacttcctcattccctgactttctccccaatatcagccaacactcagtcttcataattagtcaagtctttaaattaaaataattttaggcttgatttttaaccattatgtcagcgtctcttaaagccaaccctttgaacttgagccaaagccagcttctttggaattttggattctgagcgaccaaaggctgcctagactgccccccatcacttccctagctcctgttgctgcagaatcccgtgcctaacatctatttcttggacaattttcaatcttccctgtccccatttgtcactagtactgtactagctgttgttagaaagatgtgaaaaatacaagccttcatggggaataaagagcgattgggttgaaattaaactgttcattcctatttttaatcttggcggttccttagcccattaatgattaatcagcaggaattaacctggattaactctggaacactcagtcattttccagcagtgagacccggcttcaaatgaaagtcaagaatcccagcttctggctggcaattgctaccaatgagtcctacttgaccagggctgggccatctaacctttctgaacatgggtatactcctttaggacaatcactccttcctctgggtttcagggaggaaattcattcgttcattcattcattcattcattcaccggtgtttgtggagtgcccggtatacagtgctaagctgggcaagcagcctagaatgacacataggtccagtgaagacccagctgccctcaagggcctgtccagggacagggacctcctttatcctgttcactgtttatctttttccggaagcagatcctggcagtagggtttgttcaatcattcatttgggggataatcataagaaacattggtggagaagtgggatgagcaggagccaataaggggaccaacatcaagcctgtgactggtgtgggcacacagggctcggcgtctctggggatgctgtgaaactgtagaacacaccccagagacgtcccagctgaggggtgaggacctggttatttatccagccactcccagtcctcattggttaacagcttcttctggggggactttaacccccgcccccatcaagctggagaaagccttgcagcaagaagcccttggcagaatggtgagtgcctggaggcatgtcgggggccacagcagtgtctcccacactgtgaaccatagtccgacacagcacctgcacagaatagaggcttgtgaatatacgtgttctgtaaatattgtcccatgagcgataacattacaaagtccttaggagtgaggagtgtttacagaaaaggggctccctgtttgttcccttacataacttaacatttgatttggcctcaacacaacatttgtttcgggatggaagagcagccctgtctgagcctttgcatttcctctgtccttgcccctcatctgccaacagccagccccaatgtgctgtgaagacttccagcctcatcatcctcatgccctttgggcaaagaaatcagtcccgctgcaccaggctctgtcagggcagatctgcacaccctcagggtggcccgactttgacagccactgctgtgcctgtggacacccatctttaaccccctgcagcctcgtcagctctcccaaggcgtatctgggaaaaaccagatccatccctaggactagatggacaagggttgcctgtggtgggagtgagaggcatccccccaggctcaagtcttctgctaaatcatgcagccctccagcagcacgagaaagcccatcccacagtccagcctccaggctggggctctcagatgggaacaggtcatttcaacacaaagtcagcagtctgggagcccccagccgggggagttaccccaccctgaggggagcagaggctgacagcagaggtgtgaagaagtgggaggtagccaggccaaaaagggcacactggcgaggaatagcatgggcaaagtaaggcatgatgttagccaggtgtggtggtgtgcccatgcagctccagctagccccaggactgcttgagcccaagagttccaggttggaagaaagaagaagaagaagaagaaggagaaggagaaggagaaggggaaggggaaggggaaggggaagaagaagaagacagagaaagagaaggaggagagggggaggtggagggagaggatgatctgagatcacatcatctcagtttatctgttgaacaactcagttgttggcaaagcctgaagggcgagggagaggctgggaagagctggttctacacaggtgatcataagggaaacagggaacttccctggggtggtgcagatgtttcatatcttgattatagtgatggctgtggtaaaactcataggattgtacactcttaaaaagagtacatttggcttggaagcaaattatgcttcaatcaacctgactcaaaaaaaggatgtatttggttttagttgtgtattaaaaacaaagcattattattagaaaaaaattaaacatacaagaataattacctaatatggtccattaactcatgacaataaattgcaaatattatccgaaagactagacaggaagatgggaatatattatatctcacagtttaaaaagagattttgctttgtcaaacaactatgaaaggatgataaatgacaagtacaataaaatatcatgtgaaaataaaagccactgtgataatagagaacatgtttaggtttcttgtgccaggtaccatttgagacacgctacaaatacgtaaagttatttaaccctcagtacaaccctataagggaggtagagttattatttccattttagagatgaggaaaccgaggcacagagagagcaaggaacctgcccatgtcacagggctcgtcggaggagttacattggtccccaaggctcatggcaataactcttgcattcagcgccaggtcgtggaaggtgtgctgtgcctatagaaggggcaagatttgagcctaatcctttgagagtagcaactcaaggaagggtttgtgattgatgacagctgtgatgactcctttgacgttctatattttgggtggatgctaggtttggggcccacagggttataagacccacaatagctcaggtgagaggtgacaagggctggaatggggcagtggcaggggtaggaggtgcaaggtccttcaggaggggtattaggacatgaagtagtagcaagtgaggcttagagaccagcaggagtgaaggagagaggggttacccatgagccctgtttctggcctgagtgatagggagcatggtggtgtcactgctggggcaaggcacacaaaagaatgaacagattggggacagaagctgggggaaatgttgtattgtattttgacatgttggatttcaggagcctaaggcaagtccaggtggagacaatgtttccgtaggtctgaggctcaggggttgttgtcagggtcagtgatgcaattaggaaacctaagcatacccttggaggttcagacccaaggacagcaatgactataaccagtggatagggtgggagttgcatgtggatgggaacaggagaaaatgcttgagtcctgaacagagaaaggaaaaaacccacaaaagagtatgtatcaatcagcttttgctatgtaacaaaccactcccaaactcagtggcttaaaacaagtatggtttcttatcagagctcacacatctgtgggtcagctgaggcttggctgatcttggttggctcactcataggtctctgggtggcctgagagctcacctccagcctgggcttggctggggcaccttacaagctctgctgcacctggctcaccccctcttcctgtgatcagcaagctataaggggcattcccttctcacggtgatggttgaaggaaaagaaaataagcagaaatacatatacaaggtgtattggataggtgagcccagattcaaggggcggggaaatacagggaagggtaaagcaatggcaccagtgatgcaatcaactactgagtccaagaaggagagatggaaaaggtaaatcaggtgaggatggcctcagcaagggaagagagtttcaagaattggggatggtaagcactgttaaatgtagcctaaaaatccagcaagatgaagaccggggcacatggcaactcaggagtcaccagggaccttggggaaacagctttagaggaggggtatttggtaaggacaccaccagatcgtggagggctaagaaatgaatgggagtggagaaggtagaaggaatgtacatccattcatccgacagatgaatccagctgaggacccactaagtgtcagtcactgttctaggtgctggggagagagccacgaacaaaggaagggtcttctctcacggagctcacattctagtgggaagagagatagtagacaaagcaaccaataaataagtaagaagaattgaagtggtgcaatgggctacaaggaaatgagaatgggctcaggtgatggagagggatggggatttggagagggggagcgcagtggatgtgaagaagatggacagagaaagcctctctgaggaggtgatggttgacctgagacttaaatgacgaaaagaagctgatcttgtcttgggaaaaggaagggtaagtgcaaaaatcctgggtcagggaggatcttcgcagctggttcagggaacagaaagaaggttgtgtggctggagctcatgggcaaatggaagggagagaaaggaagggggtctgcaggcaggaaggtcccagaccacggaggcctgaggataccatgggaagctgaggttgggtgggagatttaagcagaagaatgatgcaatctgatgtgcattttcaaagatcactttagcagcaatgtgcaggatagattggacagtgtaatggaggattcaggactcaaattaggagactgttccgagattccaggcaagacatggtggatgatgtgctggtaaatatttaacaactggctctcaggtgcagatggggatgggggcactccctgatttacagcatctgccaatttctgtggtgtaaatattcccatcagagccaattgatttcaagctatggagtcattgaaggcaaagatgggaagaaatttgcagtagcacaccactgtctactatttctaccataaaaatatgagagacacaaatcattccaagagtatagatagtagtacaatgtactaattaggaagtgatggttttgagtatttattacctttgtttttaatatgatctatttcattttaagtttatataatttaatttttaataatgaccatgtttaaccaactgctggaaaaattcctaaaaatgtaacaatcagctgtcataagcaggctggctctaccataccactagatacaatagtcatgtggatcagagtggagtgtgtgtgtgtgtgtatctgtgtgtgtgtgtgtgcatgtgcacatgcatgcctgagtgcatgggaaagagagagagagagacccagcaggatttttaaatgttagaaaaatgagatgtgcatgttcatgttggcatttctgcacccatatcatctccctgtctgaactgtggattcattagggtcagtggctctacccaatgtttaattatgaacacctagtccaatgcctttgtcctggtaagaattctccctacctgggttagatctccccagaagcagaccctgagaaaaagtgttggagtgaaagcagttggaaggtgatcccaggaattaccagtagagaagtggggaagtaagacagggaatgtaaggaagtcagtgaacagtgcatcaacagcaagttaccactgtgaacagctgacgtgtaataccattgaggaactctcttgcttccaaactgagaagcaaggaagcagagtacttattcaccaattcctattcatcactggttgaaggctgctcctggaggcattagctctctggtatttccagcccacacctcagagaaagcacttaggaagaaggttgctggtgtttgcaatcacaggctgttgatatgcacaggaatggcagaggggatgtgggcaaggtgccaacagtgtctgctccaaaactcataaatatttatttaatgaatgaacaaatgaataaatgagtgtaggaccgtttgagcttctttaaacactgacttagagttttaaaacagaatagaggctgggcacagtgactcacgcctgtaatcccagcactttgggaggccaaggtggggggatcacctgaggttaggagctcgagaccggcctggccaacatggtgaaaccccctctctactaaaaataaagaaaattagctaggcattgtggtgggcgcctgtaatctcagctactcaggaggctgaggcaggagaataacttgaacttgggaggtagaggttgcagtgatctgagattgcaccattgtactccagcctgagtaacagagtgagactctgtctaaaaaaaaccaaaaagcaaaaaacagaatggagagccttccattgcatagtcagcacatgtatcacgcacttttgcaaaatttaaatcagaggacctatgtgatatcccagacaattaaaattctgcaatagttttactcaaaaccagagcaatgttgttacacaacaaaaatctctatagactatagtaattgtcaaaacaaaaataaaatatacacaaaggaaatagatgtaagtgtgaacccaagttgccaatttttgtggctgcaagtggtagtaaaagagaacttgggagaagaatatttggtttgttctgtgcgtaatgttagaagtgagcttacagataggagtttttgcaaaaaatgacaatgattgacttagtggctggtggtgagtccccagagaaaacaagaaaaaccaaaataataggtgaatgatatttatctgacacttttctgtttgtaaagtgctttgtaataattgttactataaccattattattattatcctcagttcacaggtgaggagctgacgtttagagaagtacagttgcttgctgaagccttcacatttacagataacaaagttaaataagccctgaacactccagaaatggcacctttgtaggatacatctctctgcctctcccacagaaatgccaatggagaaatgagcaggtataacagaccctacgtgagttaatgaaacctttctcctttctattgtccttgcaggactccatgcatcttcccttcagtgcagtcattggatagtagcaagcacttagtaagctgtcaaaaatgttttaattgaaccaatgacactgtctagctgtgctgtccagctatggtgtcttaagaatcctggattcacaactccctatctcagatgggaagtaccagtcagaagaaacatttcatggccctgaggtgtgcctggcatgactaggtgcctcacattggacatcttgggataaaatccaaggttcactgagttggaaggcacaatagggcttcgtctatccatccctgagcagaaggcattcttaactagtccagctagttagacaacttggctcttctctaagattaccagagatgaagagctcaggactttgacgtgtagtctagaacttcatctcccattcctggtttagtaaactcattcattcaataaatatttatagagcactgctgcacactacagtctatatgagctgctaagaattcagcagagaacaagacaaataggacccctaccctcagtgggttgatagtctagtggtgatgggggatggggggaggcaatcagtatttcaatagatggttgcttaatttgtggtaagtgctccaaagtaaattcacagggtgaagtggtatatggaaactgtgaaggaccgagttgtctttttcccccctgctttctctttccaatccatcctgctcacatttaggaaacttaacattccaaaaccactacttctatcttttcttgtctccccttcaggagcctaaaattgtacccaccatgtcaagtctctgtttctctgcctgacttttgtggacctccatataccagtgccccctgacattcaccaagctcctcctcttcccatttgtaccccatgtgcctctgcccaaagcacactccctatagccttgcatgccattcttgccctctcatctttcaagagctgtctttggtcattcatcctgtagttggtgctaagtttgccaggcaccctcttgttgataggggtgcaaagttggattgaacttggttattctctgccctcgaagagcctatggagctgattcctccacaggactccagaatacatagctaccactcttttcctctgccccaccaactccctttggagaccaccacaacacaactgggcacccgagttcactgctagattctgtacatagcaatcctgactcttcaacaaaaaagcttataaaaggcctgagtcatacttgttttttccttctgaactccctgtgatttcaattctgcaatgagttggttttagcttcaggaagtcctttcttatgtctaccttaaatcacttctacatcactgtgcgcttatttcttagagtcttattcttcatggctttagggcagagcttcggcactctgctcaatgctgggtctctgctgagtgttcacaaagtgcctgtcacttgattagtaagtgcctggtacttaaaaatcattatttgattccctcctccaggttcttccctccagacttaaaaactgcagcttcttaaatctttcttccccagccacttaatcatcttgtgacacttctcaaattcggttaatcagcattttttctttatttttaaatgattagtgagagttttaaagaaggtccttaaaccagaggcaaaatatatatatatataatagtattcagaaagggtccaccagggcaattgagttcatctccctgtctttggccctgcagtcccttctgccagctaatagatcaggccaactatcccagctcagcacaatcgtcccagcctctgatctgaatgtgcactgcagaaaaactagatttggagggatgagagcatagcctgcagccccacttgtactcttcttcagaaagctacttgtcactgtggtcagaaaactccaggccagggcaaaatttacttaggtggttgaatttaggcaacttttcattcttccttccagtgccatttcctggtgaatctgcagattctcatgagattttaggtgttgtgtgtgtgtttgtgtgtgtgtgtgtgtgagagagacagagagagagattacctcagatagactaatttgcactaaagttttactgacttaccatgaaatgcctttcaagcatttttgccataatacctctagtgtcagacgagagtgaatgtggacaccaaggaggggcatggcctttaagccatctgtccaagaagacattgacgttaccattaaacacccatatgatttttttccctttttctgagacacagtttcactgtcacccagcgtggagtgcagcagtgcgatctcagctaactgcaacctctgcttcctgggttcaagcaattcttgtgcctcagcctcccgagtagctgggattacagggatgcaccaccaagcccagctaacttttgtattattagcagaggcggggtttcaccatgttggctgggctggcctcaaactcctaacttcaagtgatcacctgcctcagcctcccaaagtgcggggattacaggtgtgagccaccatgcccggtcccatgtgattttttattcttcttcaagctatttccacataagctggttttctaaaaatggaaatagtatcattgttatttttatgatataagagtaatacatttgaatgcataatacagataatacaggacaagatatcaagaataatgtaaaaatcaccagaagtcccaacccccgatgtcatagtttaatttttttcccttctacactattttctaagacacattccttgttttaatataaaaaaagttttaaattacttaccactgcataaagagattctggcttatctttgtggtagcatcaggtccaggccctggggaattggcccagcctgatttccactttgaaaagctggcactcagatgtgatatctccaggaaccatggacatttcagaaaaggagggaagagacagggcagaagaactttctggaaatgtactggatgggcacttttgagaggagtgggtgctttcctgcctttgcacaagtcacccacaggcagcgggtggccattggcgtggacaatgtcttttgcagtgtgctggtgtttccctgaatgacctacctacaaacctagattaatcttccttgcagggaggcttcaccctccctcagcagagtgctaaacacgccaatttctaaagaagtgttttctttctttcaggcacgaaaattaatgagctccgtctttggcatgggctagaaaattccactgtggcattggcagggtttatgcagaatcagaactttaaagcaaccctgcgctgaatgctgcgaggaacaaaggtaaggcagattggtctgacttccttgctcacggtggggaagagacggcggggaaaggaggcaaggacaaatcacctggctaggagaggtgtgtccagtgggaggaggtgctttcccgaattctgaattcttttcggaacgtgtctctgcaggcagcacaatgccctccttattcccgcatcttcacaccacggtggctgacttggagcctgatgggcagtggcaagcgttcagatctatggccgacgggcacgtcttggacggattccttcagccactggggtgggaacaagcagcatttgcctcacagtctctccttgttgcgatgaattggcagattgaactgaatacatacaacgtgtggcctaattgtcaataagtacttgttcgttcattcagtaaatgatttttgagcacctactgtgctccaggggctggacatacagcagtgaacaaaaccgatgcaaagcctctccacaaggtggtatgggatgggaggtggacagtcagcacaaaaccaagacaatttcaagtactcataaaacacagtgatgggacagagtgggaggaggctattttgggatgattaggtaaagccccaagagacactggagctgaactctgaatcacccgagggaaccagctgttgaagatgtgggagcagaggtcttctaggtgcagggatcagcatgtgcaaaggccctgaggcaggagggtgttcgacaatcttaggaactgagtggaagctggtgaggaagtagtgctcatgagcaaggagttaagaggtcagaaacaaaggtaagccctggatttattaatatattgtgtgaaacattgcatctaacattgtagtgttttatagtttgcagggggctatttttgttttttctctctcttttttttttttttttttttttttttttttttattgagacagggtcttgctttgttgcccaggctggagtgcagtcatgccatcacagctcactgtagccttgacctcccaggctcaagtgattctcctcccttagactcccaagtagctagaaatagaggttcgtgccaccaggcctggataatttttttaaaattttctgtagagacagggtctcacttggttgcccaggttggtcttgaactcccggactcaagcaatcttcctgcctcagcctcccaaagtgctgggcttataggtgtgagccaccgcaccctgcctgcagagggctttgaacatacactatcctaattcaatcatcccaacaaactgattatatagataagaaaactgaggctcaggaagtaacttcctttaggtcataaaacgaggaagtagtgggacagggactttgaccaaggactctgtttgcaaaactccagagtttttatagaccaccataagcacttgcctttagcagcttgaaatttttaaaaaatgaacatttttcattctgttatttaaaaagtaaggctgggtgtgatggtgtaatcccagcactttgggaggctgagcccagaggattgcttgagcccaggggtttgagaccagcctggtcaacaaagggaagaccccatctctacaaacaataattaaaaaaaaattagctgggcatggtggcatgcctgtaattactcgggaggctgaggcaggaggattgcttgagcctgggaggtcaaggctgtagtaagccatgttcacaaacctgcactccagcctggggtacagagcaagaccttgtctcaaaaaaaaaaaaaaaaaaaaaaaagtagagtcgcataggtaaaattttggtaaatttaagaagatacaaaaattacctataatctcatctgtgaaacataacaactagcacattttagtgtattctttccagtttcttcccctagaaaaacctagggtgtgtgtgtgtgtgtgtgtattacacattacatatgcacacaccacacatacatatatgtgtatatagtcacctttattgaggtgtaatttacatgctctaaaattcacacattaagtgtacaagttgatgaattttgacaaatgtatacacccgagtaatcatcgccatgatagagatctggaatattcccttcatcccatggagttacctgtgccatttaacctgttcccccatcccccactccaggcaatcattgaccttatctctgtagcctcagatcagttttgtctattccaggacttcatataacaggaaccatgtgtgtactcttctatgtctggcctctgttgctcagcataatgttttcaaggtttatcatgtcatcatatatgcatcaagagtttgttccttttgttgctgattaatatttcattataagaatatacattcacctattaatggacattcacctgttaatggacatttgggtgtttttggtttggggctatgatgagtaaagaagttatgaccattcctgcacaaatctttttatggacatgttttcttttttcttatttattgtagagatagggtctttctatattgcccaggctggtcttgagctcctggcctcaaatgatcctcctaccttggcctcccaaattacagagattacaggcatgaaccaccacacccagcttgtagatgtgttttcatttgtcttgggtaaatacccaggagtagaatcctagcttatagggtaggtctttatgtttaattttacaggaaactaccagacaattttccaaagtggttatattatattacattatgtgagagttccagttgccccacatctttgtcaacacttagtattgttgctctttttaatattagccattctggtgggcatgtagaggttttaatttgcatttaccttatcactaataatgtcgaacattttttcccaggtaagtgtttttatagttgtaattctttgtctggaggcagaactaaagactgtttgaggccattttttgagtcctgggtaatgctgaaaatattgatattgttattgatgcaatgctctggtacagtaggcttcattcttcctctagccaagttgaaatgtggaggaaaataactctgggtgccatgttgctaaagaaatgatttgtgtgaatgatcagccaagccgcgattggatcttttcagtggcagttccagaatttcagtacatgccgtgtctgattggaagaatgggaactggacttgaagagtactttctcgacatggtgttttcatttggattgtagtgtgttagcaggatctctaagagatctgatggtgatgatgatgatggtgatgatgatgataatggggaggagaatgtggaaggagttagggtggaaactaaggctccctgcaaaagctatggcagagttggattaatcctaccacagtgcaggtgtgaggctgggtgtagcatggtattgagcagaacacctaggaaagcatattaatcctaacaggccagcagatatccctagcgagccttctctaaacacctgaaactcccccaaaagcatgaacaagagccatattttatatggtgctagctccacctccatattcttattccaggaggaattgtccagggagatggaaagcaggtggaatttgtgtagcaaatcagtcccctgggggtagcacattcaggcctccctgtgcagaggaaaaggcctttgggccaggttgccaggcctccccctgagcatatcagctcatgtgtttcctcaagacattcctaatgatactccaaaggccaaccagcagaacacctccatctgccctgagacctgacactcaccggttcccagacattctgaattataccaagccaatttatatagtttctccatctaaatgtgaacttacaaagaacagacatcatttcttatttacaaagtcttagtttgggttccccctgaagcagaccctgaaacaaggatttgagtggaagcagtttatttgcagtttgatcccaggaaacataggtaggggagcggggaagtgaggcaggggatgggggcaacaatgtggggtatgttagcaagccagttgccactgtgggcactgatatggtttgaatattcgtcccctccaaatctcacgttgaaaagtgattgcaatgttggaagtggggcctggtgggcggtgtttgtgtcctgggggcagatccctcatgaatgtcttggtgctgtactcatgatagtgagttcttgtgagagctggctgtttaaaagtgtgtggtacccggccgggtacggtgggtcatgcctataatcccagcactttgggaggccaggatgggcggatcatctgaggtcaggagtttgagaccagcctggccaaaaaagtgaaaccccatctctactaaaaatacaaaaaaattagctgggagtggtggtgggtgcctgtaaatcccagttactttggaggttgaggcaggagaattgcttgaacccgggaggcggaggttgcagtgagccgagatcacgccatcgcattccaacctgggcaacaagagtgagactccatctcaaaaataaaaaataataataaaaaaaaaaggtgtgtggtacctcccttgccttgttcccactcttgccatgtgatacactggctccctgtttaccttcagacataattgtcagctccttaaggcctcactggaagcaaagcaggtgctggcaccgtgcttcctgaacagcctgcagaactgtgagccaattaaacctcttttctgtggaaattacccagcctcagatatttctttataggaagagaatggcctagcataggcacctacgggtgggtcctgtgggtcctctgggacatggaacaggacatgactccaggttattccacctgagcagggagggagctgggttatttatctaccaactgataatagtcattgaatgaggacattctgcaacttgcagctgcccgcttgtaggcagggtggactccagcagctggcaaaagcccccaagcaaagatacgcaggtactggcagctgggagtcagattacctttgtacaatgaagttgtaaggccaagaggctatgggcagggcactgacaacgtcagttgtgcttccccaaaacgtggctcagttctggcaatgaatagatcctcagtaaagcgtgctggttgaacccagagagctcagccagctttggccccaaagctacagctcctgtttattctccagcaacccctgaatactgccatcagctggcaatactatttcaggatcaaacctaagataccagcacccttacatgttcttaaagtgtgtagtctcagagcaagcagcctcaacgtcatgtgggaacgtgtaagaaatgtgaattattgggttctcccccagacctaatgagtcagaaactttgagagtggggcccaggaatctgtattttaacgagtcttccaggtcattctaatgcaacctacagtttaagacccactgttttggactctaaaatttagggccacccaacagtttccaaagcgaagccgtttgctcttggttagaactcctccatccccaatcccaagcaccagcagcaaaagggaatggaatctctggaaacattttatactttgcccccttttttgagtttttcttttctttttaggcttagtaaatatacattgtaccaagttatcaattaccaacaatggaaagtagcccaggcatatatgctatagaggataacctaaaagacacctgtgttgaatttaacttgaaggtgggaggatttatatttctgcttgttttcctgagctaatatttaagttacttctctttccttgagtccctaccaggtgggcagtagggggaaagtcacgggtatactggtagaagaaaaagctgccctggaatttcaagtccatcacagaagatgtgcaaggagctgggggtacccacggaagtcactttgtgcaggaaaactgcatgaaggatggacttggtttaactgaattgacgcaggccaggtgagaataggaaccgtggcagcaagtggcagcaggtggattcataagcagtcttccaggctgatgttttctgtacagcagacatccctcactctttcccagcaaccccagctgagaacagcacccagacaggctgatttcttctggagaggcctgaggctcttgctcctgccctgccctgtgccctgatgccagcagccactgcagccctttttgtgctcacccccgacctgtggtgtgacatcacaatgtagtccattcaggatcttgagactgatttgccccatgggcctaagacataagctgaacctctggcctgcagttccagatccaaggtgactgagacaaactgccagctgccactggcttatcaggagcacctggtgagtattcagaactttcccaagcagcatggaaggagatacagccaacagctggctgtcttagcactttaaggtctcattctcacacaggtttagatgagccaaaccggtggacaggagttcaccaggtaagccccaaactcttcctaggaaagctgactcacctgatgcacacaccccttcccagcctcttcctgctgtgtcaccatctgcgggaggtggtactctagtctcccctaagactcggcttgccacctgcaccagctccctgggcaaaggtcacctgtgttcttaatagagcagagaggccaggctttcagatggcaaattcactagagcatcacttctagccctaattgaggtcagggacagccattggccaaatgacacaccacatagcaggatgagcagaggtagctgacacagccacctcccgtccaaaatgtgaacgacggtccttcctttctgtaagaggccttcctgctttggctgtttttaaatccacctcctggtgacctgctggtatatcaaatcacttcctttccttttgggacagtaagagagctttaggatcgtgacgggaaataaggagatggattagaacaccaggaaagtgggcaaaatctaaggtagcggggacagggacagaggccaaagccatctctcaaagaggatgctggctctttccatatgggccacctgcactcggctgagggtggtttgagactcaaggccttctataacaaacagtagggacccgttctgggccccaggaggcacagctgccttccctaccatggcccattcgtgttttcccacagtctgtctacggtccattcaccatctgtgagtgccaacacgtccacacagctgcagctgcgtcccttctcccacaaaggagtggcttctatagggaccccatgattttaagaaggctcctggctctccttgactgtgtaaggtagaaagggaggtggtggggggtggatcagagaaatattttacccttaggctttgccatccctccttagttttatatgtgatgggctgaagccaacctctgcttcacacacaaatccaagacgccaatggttcaccaagcatgctaagaacattttagcctatgttaggccccactggaaaaggaaaaaagacagtagaggggccggcgctagagcaacctgtggtccccgtcctgcagcaggtttaatttggagaggagaaagggagcaaacgctgaacctcccgtgccagacccaccagctatgttattgctcttaattccgacctctgtgaagcaggtgttctcaggttcattctacagacatagaaactgaagactgttctgtgctggtgccacgtctaaagagggtcattaacctggagcatgccttcactctctatcgactatccccaacattagagctctctgaaaagagaatgggctgctttgcaaggcagcaagagtgtgcaggccacggctcttccatcagcatggaagggaacgggattcttgtgatcagctgggagctggaccaaaagacctttaaaggctgtttccaaatccaagattgtaggtttctgggtgttagtactttgcccaccctctgcgattgaactcaggtgggtcacgccttaaggacggctgcaaactttctgttaggcaaggagaactgggaagaaccatagagatcagctacgggccccaggtaggaaagaggaacccaggctggttgagggagttttccaaggctccagagccaatttgcagagttaacctgtgttgactgaacaaatggaggagccagttctgagtgctgatcaaacgttcccatgcccatctctctcattcacctggttctttcctatcaagattatgattcagccaccatttacaaaatgcctgctgcatgccaagtgtgtttccagagattattccacctactcctccccagctccatgaggtgggtgtcatcagccccgtttctcagatgagcatggttaggtaaccaccccagaggatcaggtacttgtggagatgtcataaatactaaatgacgaagcaggtctttctaaccccaaggaaaacttatgtctccatctgccgcctcccagcttgtgtgaggaagcagggtctcctttcttagcctttccctaaggcaaactgccatcgatgtgccaagttccacagtgcctatttccagctcctcttggacgttgccctgatggatgctgaactccctgtgggcccgcctgtttcactggcccggcccctcactctgatggggcaagatggagcgatgtctatacacggacagatgttatgcaccaaggaagaaaatctgctaatcgaaagcagcttcagctaattgtggcactctcccttctgcgtggtgccctgaaatagtagccatgctctgttcttttttcacatcagggagccccaactggcaacttaaatgaggttgcaaagaagtcagttacacagacctctgctgccagtttccatggatgaggccttgctgatgctccttggataggacccgtgtgcaactgtttgtggacttggcttcttgctgtggataatttggacccactgttgggctggaaaagcctcatttaaccctggggaaaactggaaccttcagaaatttaatggaatactaagcccaagaacacatggtctgaccttgaaccctggttctgatctgcttctgagttattctatagccatctcagccaacagaaccgtcacgggaatattctgtctctgtgttgtctcatatgatagccactaggcacacagggccactgggcacttgggatgtggccagtgggactgaggagctgcgcttgttgtttaaatggaagcttagattacatagccatcggtggctggtggcggtgtgctagacgctgctgctctgggccctgctgacttttgtgacttcatctctgatctcattcccctctcctggctttccctttccctctgccttcactcccagacctcctgtgctttttgatttttgcatttgctgttctctctgccggcatcactttttcctctgatcattttatggtttgcccctgttcaacaggagggcctcagatcaagtgtgtgtcttcagaaagatcttccctattctacctaattgtgtccccagccccattccaattgctccttatctctctgaagttacgtttgtgtgttttcttgtctactgccctatccctggataaaaatcccagtttcaccagagcagggatgcagtctgccctctcccactccatctctgtgcctggaacagcgcctgagaggcagaaagtgctcagtatggtgcttacagtgtgtgaacattctgcaggacagccccctccttcagtgaggaggaaaggcggtcatggccccagtaacttctgctgtgtgacaaaataacatgagcacagcggcctagaacagcaaagattcgtatttcttccaattctctgggtctggaatgtgagcaggactcagttccacattgtgtcactgagggtcactcagctgggggctaggctggacagggtggcccaagaaggcctcactcacacagctgggacttttgggctctccaagaaacatctctatgcggtttgtctgggttttcttacagcatggaggtctcagggcaagtaggctgactttttttttttttttttttttgacagtgtcttgctctgttgcccaggctggagtgcagtggtgtgatcttggctcactgcaacctccgcctcccaatcctgggttcaagcgattctcctgcctcagcctcctgagtagctgggattgcaggtgcctgccacaatgcccagctaatttttgtgtttttagtagagatgggatttcaccatgttggccaggctgatctcaaactcctgacctcaggcctctgcctcggcctcacaaagtgctgggattacaggtgtgaaccactgtccccagctggcttctgagagaggaagcagaggctgccaggcccagaactggcagcaccatttttatcaccttctaccgggctaactaagccatagggcgagagcccagataaaaggggaggggaaactgtccacttcctggtgggtgggcaggatgttcataccagcaggaaggggtctatggacacgctacacagtcacttcaacagtgctgtggtagtgcttctcaactttgatcatgcacatgggccatctggggtctagttaagatgcagatttagtaggtctggagtggagcctgagattctgcattcctaacaaactccaagagacgtcaaagctgcaggcccacaggctgcacgtggagtagcaaggctgtattagaatgcatcctatcaggactgagcctatgcttaggtttgacattgcagggccctcaattccacttctagagtggacagcacttctttgggttaagcattacccactgttgctgaggtctacatgatcggtcccttcttcccaggcatctgggcttgtgcccacatagggtaactgtcccatcctacctcccaagcacttctcatgcattgctttatcagcctttaaggcctcttccttctttaacatttaattatcattgtgtcccttgtaaaattggtggaatgggtctctttcagttaggattagaaactaaactcaaactagttaaaaggcaaaggattgattggagcacatatggcttcaggactggctgtatctaggccctcaaatgatgttgtcaagaaactacttgtcaccatctccagttctgcattgccaggatcgctctgacaggatcccccacaagtggaaggagagacgaacactcacttagcaaccccagcaagaagggggcaccacttcttgcctaatctttctggcaaaagtgccaggattctgtctggctggcccagctgaggtcgcgtgtccacaatgatgcagtcactgtggccaggaggatgtgttacctcattggccaggcctggtcatgtgtgttgttacctcactggccaggcctggtcatgtgtgttgttacctcactggccaggcctggtcatgtgtgttgttacctcattggcgaggcctggtcatgtgtgtccctggagccaagtgggagactggccccacccaagccacattggatgaaagcaggaagaggtgattctccatgtaaaattggagagaagggagagcagttagaaagctaaaaaattgtcccaattgatcatgagaacaggtgttgaagtccttgtgtgatggctgagaaaacagagggcgggagcctcataaattccagagggcccacagctaaccaggcctcccaatccctagcacagactcaggggctgtcgaattaaagatctttagcaccagaagaatcttgaaaattagccaacgcatgttccacagaacactggttcaagggaagctaactgatgttacttaaaaggctgtctggtctaggaaaggtaaaagataatgggctaggccaggtcagtagttccctagctttacaggacttttcaaagccgtaaataggctggtgtacattgtgaatccctgagaatggggggaggcctagggactattgtttggaaaattagtaacctaactctattcctccccattttatagatgaagcaactaaggccaagaagggaaagtgatttgggcaaggttatgcaactagttcatgctgggattaccccagatgctatgttgaggcatacttcatgctgtgcagaagcatctctttgtacctcagggcagccctgtcctcctggttgtgttcctgctgtctggagtctgtgtgttttcctttctcccacatatccctgcataagggtttgtgggcttctatggcactgctcctgtgagggcccatgggcacccaaagtgcccaacccctgcctgggacatgcccctcactgctgcatgcctgagggaactattgagaggtgcagaaaaccacatgggtctgtacttaggaaaacgcagccacccaactggcaaggtgacggcatagatgaggttgaaggggcttgaaggttggccaaatccggagagtcagcacagacagacaccaagtgtgccaggctgaagggtgaaggttcctagagccaagtacacactttaaatccagggagagattgtgggtcagggctggggtgtgctgacgtgagggtgattgttatagcaacattacctttgagaccctcattcacctgggcacttcatatgagctcattctaagccactcagtgacccggcttggggattatcatgacccatatagatcaagaagaaaaaagtagctgttggttagttggctgaactcacaggtatgagcttaacacgaaggattcaagctctggctcttctcttcgccaagtatatgatcttgggcatgttactaaactgtctaagcccccatttcctcatctggcaaatggggctcagatatgttcctacatcatagctttgtcgtgaggattaaataagatgtctgtgaattagcaagacacctagcccatccgtagtaggggatccttaagtgatggcaggaatggagaggtaggaacagatccaccaagtaaagggtaaagccaagatcaaacacaaatccagccaggtgtggctccttctgccttttcactgccactaagagaggggtagcattcaatgagcagatggcagtggctcagagtgcagatcagtgcaaaggtctttctcgtcttctctgcaaagaaggagggatggcatatgtgtatctttggtcatttccaggtgactctatccaaagtccatgcaggcaagtagacgctgtgagcaggatggaatatacagatccaaacctctagagcagagctagggccaggcatgacttgatcaacatctaaatgccaccaacacccaagggccacacagagggaagagaccggggaccacatcttggcactttcagatgggtttgcaagcactggaaatcaaagcttcaccagggatgctttaaagatgaaaatcccagccgggcgcagtggctcacgcctgtaatcccagcactttgggaggccaaggcaggcagatcacgaggtcaggagattgagaccatcctggctaacacagtgaaaccccatctctactaaaaaaaaaaaatacaaaaaattaaccgggcatggtggcaggcgcagtcccagctactgaggctgaggcaggagaatggcgtgaacccaggaggtggagcttgcagtgaaccgagatcgcaccactgcactctggcctgggggacagagcgagactctgtgtcaaaaaaaagaaaatcccagtaaggatttaagggaagatgctgggagtagcatgtggtccccgagtaggaagatggaagtacagcagaggcaagaatggcagtcactgtttgtagatatttttcacagggaaggtcagaacatgtcccagggaaaccatgtccaaggttcaagatgagaatgacctgatcctatatatatatatactttttttttgagatggagttttgctcttattgcccaggctggagtgcaatggcacgatctcggctcattgccacatccacctcctgggtttaagtgattctcctgcctcagcttcccgagtagctgggattacaggcatgtgccaccacacccggctaatttttttgtatttagtagagacgaagtttcaccatgttactcaggctggtctcgaacttctgacctcagatgatccacccaccttggccacccaaagtgctgggattacaggcgtgtgccactgcacccagccccagccaagattgttttttaagaatcaaaacttgactacgggctggacacggtgtctcatgcctgtaatcctagcattttgggaggccaaggcagatggatcacttgaggtcaggagtttgagaccagcctggccaacatggtgaaaccctgtctctactaaaaatcaaaaaaaaaaaaaaaaaaaaaccaaaaagaattagccaggtgttgcggtgcatgcctgtaatcccagctactcgagaggctgagacagaagaatcacttgaaaccaggatgcagaggttgtggtgagctgagatcatgccactgcactctagcctgggtgacaaagtgatatgtctcgaacaaaaacaaaaacaaacagaaaaaaacctgagatccctgatccacaaaagcctgaaatatgatgtcaaattgtatttatatgtgcaagggggcatttttcttgaaggaaggtccatagcaggagagacaaaccgtggcatggctttgttttgttgggtccatacagcattatgaatatttgaatgatttcccaacatttaaaaattggatactagtacataaaaatctaaacgttgggcttctcttgaaaagactcagaagagccagtcacatgggacccacattccagaaaggggtggcctcctttagatggggtctgggacctcagtcagctacacagtccatagcacttttgtgacctcctcagtggatgtccaatgttggtcctcttttatcagcgcccttgcactgttttcttcactgctttatttttttaatttgccttgtccctctggctttttcatttgcaacccgtgatttgaacttttaatagatgctcaaagggtggctgattttaagaagatcattgaaaccgagatcttttttccagcttaaactctttcccaacaatccagtgttgaaactgacccttagtagaggcggaacaccacccttcccaggcccagaaacagattcttttcctcctaaggaatgcgtgtatgttgtttgtccaagcgcatgtttacaaatggcaagcttatcttctgatgttataaaacaccaaaagctatttagaaattactgaaactcctatctatagtttctgcaagatactgctcaggtgataatgcaatcaatgaaagcaatgacaatctgggaaatcctttctttataaccttgagaatgtggctttgaatggagacaaatcaaacagatagaactcttgctcaggccccttttctgaagccagagccaacaagcctagtgattttcttttgaaagggtcttaagtaggtctttgcatttgggaagatcaggcaagtcacttagagccgatttctgaactgagactcacagaagcacatactcacaccctcctatctggagacatgtggacctggagggctggaggaactcagatgccttggtccttaggaggatccagaaccaccgcactgaggcctagcaggcaagggcaggacacacaaaatgtgagagcagaggaatgaaggaaaattaaatcttgggcgaggcattctgtccagcaaagaacaggaggtgaatacatggcacgtgggccttcgatatcctatgagtggaatgaaggcaatgcttaaaacactgcaccactgcacagctccacctgtacacaagatgcccctttgttttggggcagccaactgctgcatctcctgtttatatgtgcacccaagcagaggaagtcagtccaaagctagaaggagggaaaatgattgcccagaagctcaatggaagccttgcttaatatctcagtggttgagaacacagatattaggctgaggcccactcggtttgaggcctggcaatgccataggtcagttaatttatcttatctgtgaaatgggataatcatagaagctatctcatcccaagggcaggtgggtggatgaaatgagatgatcttggtgcggagcttagcacggtgccttggtaagcctggataagcatgagccgctctcttaggtgggtttcccagttgctgacctgatcatctaattgcagtgcaagtagttgatatggaaagggttcctggtcccatgaggaagggagtgaggatgtgagaccgggaagggaaggtggccttgagcagttactgccatgagcactgggggctccctcccactggggatgtctggatatcacctaatgtgggacaggccccagagctgtgccacctgaggggtgtggggctgggtacttacccacctactcacatcctggccgagggctgctcccaaggtgtctcgtccccagccctgtccacttgcagggcgaagagccaccatggaaaccatgagccctgggggggacatgggcagggcagggacagcgtctgctaaaactgtccttgttgttctgactcctgtcctggagagggaagagctggtctttggaaccacccagacctcagcctgcagctcatcactgccttttactagataggtggccccctttgcctcttcgggcctccattttcacatctcttaaaataggaacaattctctaatgttgcagaattcgttttgaggactatgcatgacaatggccatacagaggcaggcacgtagtaggcgctcagccaccatgagcccccttactcgccagctcaattcggttccatttctcccgcttgcctgtgatccttattctgtttctagtcccggggtgagcccaggctggcaccagaccttctttccatgtgagcagggacaagctgacatccagactagtgcttgcctccgaggtgacttctgagtgacaagctgctgcagtgatctcccaagctgtgtattatcatcttgtttcccctttagcttcgagcctcgtcagtctgtggctttcatcagatccagagagggtagaataactggccggcctaacggcggctgagccaggagtggaatcccagcaggaagaactttggacccttgcagttcccgcagcaacccagggctgggtgtgtgggcagatctgggggcttctgctgagtcagactgtgtgggagtgttggggcgggggcgggggcgccgccagatgaaatcaggatgcccagtgaaatttacatttcagataaacaagaaaaagccccttctgtataagtacagtctgtgaaatacttgggccatacttatactaaaaagttatgttgtgtttatctgaaattcaaatttcactgggcatctgacatttttattacctaaatctggcaaccctactctggtgggaacggagaacaaacctcctgggaggtctgggttagagatgagcacagcaatcctcctgcaggcaaaggccagtgtggagccacttgcctgcccccagatggcctcccccggggcccccctccagggcctgtaaagccctcatgagagtcacttttgcctgaagacattgtttaactgcacagtggagtcagttacagattcactctcaccacacttacccgtataaagaaaatacgattctttattcttagacacctccacacaatgtggtaagaacagagtagctgcaaattatgtatgtgttgggtggggttccctggaagcagagcctgagagccgggttccggtgcccctgacctggtgaaggaagcaggagagggcaggggaggagctgagaggtgtgcaccaggggcactcagcttctacctgaccccctggggggctctggagccggaatggtaccagggagttggctccaccttgagacaagggggttagggttttgtgcttccacatccgcaagccattagttgctcttaggcagaggcctgggccttgcacctcccaggtgtctccaggtgtagcagcttccacggcagaggtgacagtccagagaaagccacaaccacgcattgaggttccctgcaacacttgtagcagctgggtgcaccagctggtcaaggagacctgcgcatggcaccaatggcacctactactctctgtctccttgcaatggaatagtcagattctctccaggccgtgttagagagtccctgttgggaggtgcggtctccttagggactgctctgcccctcctccgtccttcctaaagagtgatggctgccaggtgggtgtggagacaggtgctgactgtgtcttcaaggcagtggggagaggggactttgaatacccacggaatctgcaggatgatggcctgagcctgtggcagtgcggctgctggaatctgctccttgccatggaggggtgaccagtccctttttgtcttttagggctatcttagtttccactgctgcagcctgtggcctggacatttgcccatggttgtgaggtccccatgcatgggacttcttcctcctgactccaggcttcagttcacccatcaggccttaaagcatcttcggccctatcttgccctgaactttttgctgcaaaaaccaagggcactgcctcaagcttatcttcccagccactgtttactgctgctacattgttgcccaagacacttcagaagtgactgttgttgtcatctcctgccaagtcctggaaggcaagccaccaagtcccatgcaccattcccacagcccgacaaccttcctgactctacccactggaatctaaagagtctgcccacttctggatgtttgttcaggtagggaagttcaagccccgtgcccatgaacgttcatctttcttttctcttccaccttccctgggagggtagtgcggataatgaggtgagccttcttcctctttctagaatccatggggcagagaaggtagattctcccttcctgtcttctggggaaactccttctccctcccgagacaacattgctttccccttctctgtggggtaataatggcagagagaggcgggatcagaatgctgtactcataagggggtgtatattgagaggtttagaaatatgttacagtgcccctacgtttatagcagcattagtaacaatggccagatggtggaagcaacccagcttcccatgatggatgaatggaggagcaaaatgtggtgtatacaatggaatgttgtttagtcttagaaagaggaaaaatcctggccgggcatggtggctcatgcctgtaatcctaatattttgggagatcaaggagggaggattgcttgaggccaggagttcaagaccagcctgggcaacttagggagaccccccgatctctacgaaaaaattaaaaaattagctgagcatggtggtgcatatctgtagtcccagctactagggaggctgaggcaggaggatggaggatcacttgaccccggagttcaaggctgcagtgagctatgattgcactccggcctggtgatgagcaagactccattttaaaaagaaagaatgagagagagagagagagagagatcctgttgcatggatgcaccttgaggacatcaagctgagtaaaataggccagtcaccaaaagacaacccctgtgtgattccacttccatgaggcatctaaagtagtcagcttcataaagacagaaagtggaatggtgtttgtcaggggctatgaggagggggaaatggggagttgtttattggatatgagaatgttctgaagattggcccaacaacgtgagtacattgaacactactgcactgtacacttgcagatgactaagatagtccaggcgcagtggcttatggctgtaataatcccagcactttggaaagcagaggcaggaggattgcttgaggccaggagtttgagaccagcctgggcaacatagcaagacctcatctttacaaaaatattaaaaaattacccgggtgtggtggctcgtgcctgtagtcccagctactcaccaggctgaagcaagaggattgcttgaacctgggagttcgagactgcagtgagctataatcaggccactgcactccagcctgggtgacagactgagactccatctcaaaaataaaaaataaataaataaataaataaatgttaagatggtaaaaatttaagttgtgtattttaccacaattaagaataaaaagtggtctgggcacagtggctcatgcctgtaatcccaacactttgggaggtcgaggcaggcagatcacctgcggtcaggagttcaagaccagcctggccaacatgatgaaaccccgtctctactaaaaatacaaaaattagccaggcatggtgacaggtgcctataatcctagctacttggcaggcttaggtacaagaacccgggaggcagagattgtagtgagccgagattgtaccactgcactccagcagcctgggcgacagagtgagactctgtcaaaaaaaaaaaaaaaaagaaagaaagaaagaaaaagaagaataaaaggtgaaaaaaaatacatctattacaaatgcagatatctcatccatgaagggtgaactaatatgcttgtccattctttatatgacttattctatttcatcagctcctgatcctttgcagataacaggaccccaaagggaagggaatattttcatgaaggaaaaatgcaaccagaaatagtcctggctagaaccactatcagacaagtatgtccagcctagatggaattttatagacaagggacaattctattcacaaaggttgggagacagagtcatgggacaaggaaggtggaggctgcacaagctgggagacaagctggcttcttcatggatcgttgcagtttgccttggctgcaggcatggtgatcttagcacacatccatgaaaccttacttagaattgctggggccagaagttctagggaattcaaaatttttttttttgaaaaaatgggcaatgtgatgcctcttttgtatattacagaacattcctagtggagcctggctcagcaccctgtaaacccattaatattcctgtggtggagtgtataaatattcacactaactgggataataaagactataaatagcctcatgtcagttcaggccagcatttgctgccaagtaagtctccccgccctgtgcccccaaaaagaatttctggatttcagagccatttggatatgaaaatggtagcttagggattgtggacctgtatgaattttataccatctagagactgtaaatgaacagagacaaaacataggaaggaaccagaaggatgaggtcagtgaatttaacgctgatcttataaataagaaatggaggtgacaggcccaatgtcgctctgctggtcattggtggagctaaggtcagacaaggatctcctaccctcagcccagctcctccagcaggagttaacaggaacctccagacccagagtccatgaagctgagccgccacctccttcctagttccctgaaaaggtgagccctgcctttgggaatgcctccttatggctagtacaccgtgtgtggtgtgccctgccgtgggctggttctgttttctctgggagaggtatctgcagaagacatcgtcctgagggttcatgcacttagctcaaggccttgcacacagatggcactcagtgaatgtctgaggaactgttgaatgtatttggttattcatcacctgtagacccatcaagataaggatgtataatcaaagggccatgtgtaagacagccaacaaggagcggagaaagaaaaaatcttgttccccattgcagaatcggagctaacggcaaggaaggcaaatattactttatttttgaacaacgagcattagtggtcattagaaagtgatttctttcattcctgatgcctaagccatgggcctgaccctgccccagcactctgggtggaatggggaggcctttgtgcccagcacagtgctcggtacacaaagcgtgtgccacaaacacttgttggatgagtgagtgagtgaatgagtattaggggtcatcagttagaactctgttataaaaggcacaatcctaacttaaactgaagtaagcaaaaatgactattttgtttatttttgcctgacataattgaaaagtccaagggtagtcgccgtcaggcatgtctaaatccaggcctgcaaatgattactggggactctgtctcttcccttctctcagagctgctttcctccaccctggcttctttctcaggtgagctctccacaactgtggtgaccatgaccacggtaggctcagttcccacccgccgagcagccctcacagaaagtgactcatgtggcccaagaaggtgaggggtggtcacttgcctgccccaggatactgtggtgagcgtggtacaccctgaaaagtagttcctgagtggactgtacaaaatggagccctgtggaagctcttgaggccatgagcttccatccaaaatggaggcatttctccctccggtgtatgagtgcagcctgacagggtctcctcagacccttaacagcctaggtgggagagggctcctcagagtccgaccttcagtgttataggaaggttaccccccttcttttcttttccttttttttcttttttgagacagggtctcccctaggctggagtgcagtggtacgaccacggctcactgcagccttgacctccccaggcccaagcaattctcccacctcagccgcccaagtatctgggaccacaggtgtgtgccaccatgcctggctaatttttgtaaagacaaggttgtggcatgttgcccaggctcacccgtctttcctttctatttttttttttaaagaaagagacaggtcaggtgcagtggctcacacctgtaatcctagccctttgggaggccgaggagggtggatcacttgacctcaggaggtcaaggccagcctgggcaacatggtgaaaccccgagccaggtggtgcggcatgcatctgtggtcccagctactcgggaggctgagacgggagaatctcttgagcccaggaggcggaggttgcagtgagcccaagattgtgccactgcacttcagcttgagtgacagagcaagactccatctcaaaaaaaaaaaaaaaaaaaagaaagaaaggaagaaagaaaaaagaaaaagaaaagagagacggggtctcacttggttgcccaggctggtcttgaactcctgggctcaagtgataatcctcctgccttggcctcccaaattgttgggattacaggagtgagtgatggcaccaggccagccaccctcattttcattctttctctatgaaacactgatcatttgaagggagaaactgcaactctggagagtgtgggtagaggtacagggagccaggaagcagcattgacagtattccctcagattctgaggggtgagcatctgagctccctcgggcttgactccatcagtgcagaggtcccatcatcctctcactgtagaccgaaggcacagcaggcatccaaggaacaaccctggggtcattctcaccctcatgctctccccgctgcttgttgctacaagactggagtgttctcagggcataggggtgggtgctctgttttcctataaatctgcttggtttgggagatacttatattccatatctgtgaggagttaactatgtaataaagtagcttttaataaaggatgtcagtgctttgaatatacgaatctacattttaaaataaaagtagaaacagaaaatgaaggcaccgagcaaaagaagcaaatttaactacaaagtgaaagagctattcatctaggctagtttccctatatggtcattagggttagctcagagcttcctagtaggccaagtaaaaaaggaaacaagatctttacaaattctttttatcataaaggtagaaatataccaattttgaaaggcatacttttttcttggcattaagttccaaaagaaatatatcatgtgggataatttataaaacaaaatgtgagcagcaacagtctcaaccatgttcccacagatgcagattcccctgcccaaccccttgtgactactgtctataatagatgagggaaaaacactgattttaagtattaacatcccacttccctggggtaggcaatatcacatgtgtctaaatataaagcaaacatggaaaataagataatctcacagtttctcagcaagaaaattccaaaaatgctttttggccacttgaatatataaacttttagggatatagataaaatagtcttacaggtaccatttgatttcataatttaattacacacaattgaaataacatattacataaaataatatttagaaatgttcatgtagcaatctgttaatggcaaaataatacatgaaaatattgcatttttcccattgaccttttgcaaaaacaatggtattctaatgggagtcactttttgtgttgtagaggtgttcgtttgtttgtttttgtttttgttttgagatggagtctcactctgttgcccaggctgaagtgcgatggcgagatctcagctcactgcaacctctgcctcccaggttcaagcagttctcctgcctcagcctcccgagtagctgggattacaggcgcccaccaccatgcctggctaatttttgtatttttagtagagacagggctgctgacctcaggtgatccacctgcctcagcctcccgaagcgctgggattacaggcatgagctaccgcgcccagcctgcattgtagaatttttagagaataacaagttcacttccagccaatggtggaagagatgtccctttttgaatccatgtatagtgtccccactggaaattgtatcccaagccccaaatagccatttgtatggcattggagcagttccccatcctcaccccatttatctgatagtggggacatatttgtgatcacctccttatgaagacctgtcatacagcttttaaaaataaccttaaaggatgtcaaacatttgcaactgggaggtcattcctttgggaattgagattaaattctactgattcctttattccttatttaaaaagttgacgctctaagcatctaaaaccagaattgtttttggtcattccctgccgatgtgtcctccccaaacaggactttgtggttcaaaatacagtagggtcattgacagaacaccctgtaatacaagaacttttacaggacaggattatgttgaggcatctgcttagttctgttgtatgatggccaagtgcttaagctgtccataatggacccaatgctgcagctcgcccggggttacaagagggatgccttagaagaggggcgctcccctgaaagatggagagctggtgtgctttgccaggtgcatggttgttgttgttgttgttctgtttcgttttgttttttgagatggagtttcactcttgtcacccaggctggagtgcaatggcttgatctcggctcactgcaacctccgcctcccgggttcaagtgagtctcccgtctcagccttccgagtagctggaattacaggtgcctgcccccacgcccagctaatttttttcttttatatttttagtagagacggggtttcaccatgttggccaggctgatctcgaactcctgacttcaggtgatctgcctgcctcagcctcccaaagtgctgggattataggtgtgagccaccacacctgggccaggtgcatcgtcttgaacaggtcatttaccttcttaggccttggttttcttatgggagaaattaggggtttaggctagattagagaaggatttcggggagcccaaggagggcatggggatggcatcatgtgttggggggctctagtgtcctcttctcattcccaagtcaacagagagtaattctgctttgatctattttatgtaaaggaattccaggtataatttcctttgaagtaaagatccctttttttaattaaaaaaaaaaaaaaaagaggagcagcttgttattcaggtctgtctgctctgaagttctctgacttcaaagccattggggtcatagttgtcttcctattgatggctaatgaggacatgatgcgcctggtgatttgggggtagacactgcctgggagctgcgagcatgtgccatatggcagcacagacgctgcagatccccccgcaaaggcccatttagctggaaccccatcatcccagcaaatctgcttggaattttatcagatagaagcaaaggacaagacgtggttctccaattttgcaacatacttgagtcacttggggagtttttaaaacttctatgtccagggcataccctatgctaatgaaatcaaactctggaggtgggatccaagcatcagtaatttgtaactcgccccatgtgaggcctaatgtgctgtcaagtttaagaataagtgccactggtacagccgcttggaaaacagtatggcaattcctcaaaaaaataaaaatagaattaccatatgatgcagcaatttcacttctgggtatgtacccaaaagaattgaatgcacgttctcaaagagatatttgtgtacccatgttcgtagcagtattattcacaacagcataaggtgggagcatcccaaacgtctatcaatagatgaagaataaacaaaatgtgttgtgtacatacaatagaatatagttcagccttaaagaggcaggatattctaagacatgctgcagcacagatgaaccttgataacattatgctaagtgaaataagccagacagaaaaggacagatattatataattccacttaaaatttttttctttttagattctctgcagggcaagttctacacagttccacttatatgtaacttccacttatatgaggtatctagagaagtcattttaatagaaacggaaaatagaatagtggttgccaggggttgcagggaaagatggagacttgctcttcaatggatatggagtttcaattttgcaagttgaaaagagttcaggagattggttgcacaacaatgggaatgcacttaacattactgaaccgtgcacttaaaaatgattgaaatgggacattttatgttaggtatattttaccacaattaatgcaataacataaaaagagtaagtggcatcatgaatgtcttgctggtggaagtgaggtctgtgggccagcagtgtcacatctgcttggagctggtcacacatgcagtatctgaggcccgtcccagacctgctgagtcagcacctgcattttttaacaaaaaacccccaggtggttcgtgcactcactcaactttgagaagtgctagttgtaatgaaccaaacattagaccagggtttagaaggtcagaagatgtagcagacattgttgtttgcctacccagcattcatttcctctcttccttccttccttcttacagaaactgacgttctctgagtagcctcatgtttcagagggggctcatctcatccacacttccatagccccatagtggtcccattcccctggccagtggctgctttacaggtgggcatgttgcctggttctggccaatgaaactaaaggaagttccactggagagtttctgcgggaggttgcctcccttaaggacacccaagaagaaaagacctctccttcatttggaaattttttttctttttctttctttctttctttctttttttttttaagacggagtctcgctctgttgcccaggctggagtgcagtggcgcaatctcagctcactgcaacctccacctcccaggttcaagcaattctcctgcctcagcctcccgagtagttgggattacaggtgcacaccactacgcctggctaatttttgtgtttttagtagagacggggtttcaccatgttggccaggctggtctccaactcctgacctcaagtgatctgcctgcctcggcctcccaaagtgctgcgattacaggtgtgagccaccactcccggcacctttggaagtttgcacattggaataggacccaagcaaattctggaccgctgttcacacagagtcattgactgataagatcctgggtccacctcatcaaaggatttcttgttatatgagattagaagtgtatttattgtttcagaccacatggggcaggatttttcattacttatagcccagggtttcttaacctcgatggtattgacacctagggccagataattctttgttgtggggcagttgtgtgcatggcaggatgcttagcagtgtctctggcctctgcccactagagccaatagtccttccccctctcccaggtgtgacaactcaagtgtctctggacattaccagtgttccctggggagggggtccaatggcccccagttgagcaccactgttgcagccaaaggtgtcgtaaagaatgtgaagacctttttattctgacctccgacgttgctggagagccccaggagggcaaaagtcactgcctatgtccacaccccagagatgttgcaaggatcaaagtgagctcaggtgtgtgagaaaagcaaacacacacaaggtgttactaagcattacccgtctttgatgctgctgatgcattgatagcaatgttgtagtttccatttattcttagatttcataggcagagatgtttaacttaacagatggccagcatggatagtgaatggaattttccctcagcaaaggcagagcggctcatgagactttcaggcttttccttgctcagaaattctggattctcacccaattcatcaatcccaattctcaatcccaattcatcatcccataaatccatgggtgctgaggcgttctcctgttaacacctgagttaaacaccatcttgtacttacgaaacatattttcacagatgaagagtgagattcctatttagctgctaaagagaggtcgatgccctcggctcacacatctgtggatttaagacccacagagtcaggggaccctgaacaacctctcatgtcttttgctccccttcctagaatctgctgacacatcaaggccacttttcttaggagccccctgacttccaaaatcagtgcctttggattcatctcttccgggagagttcagtgtcttctgaaatgttacaaaacgtccttcagagcaagaaggcgtacacgaggagctcgactctgtagaaaggtctggaggaggatggggacaggagaggggatggggctgtgaaagggaggcgttggatgcacctgatcatttacgtcatcgaatgcttaccatgtcctcagcagaggggctggtgttggattggggagcaaaggccattaggaggcagctgcagcccttcggggcttcatgatctgctggggaatgtgtggaggacattgggtcattcctgtatcatagtcccatattgtaaggggtaactatccccaggaacaggataactatcttgatttaggtccccccagccccacccctgcagcccatgggctttgagggacactgacttccttgctgagcccagaggtagaacacacatatcaaaccacaatttttgttttaggggttggcgtattacagtttgaaccagagagggcatttgttgggggcccctaggaaaagatagctttgtgtttctttgggggagagggctgtggcttgcaaaggcaatgctgcagcccagttacttccacgaaggagttaagctgaagattgagcccattcacaaagaaagactgagtcgagagagctgccgggaaatcaagctgaagccttgctcaacctacgtctgatctacctctggactttttggtagcatgtgctaataacacctccctattgtgtaaactgatttacactgagttttgtgttactttcatcataaactgtccaaactggcacagaattttgtaccaggaaggggatgctacaatgaacaaaccttaaatgtggattggttgagaagagacattcaagcggacagcagcaaagatgtctctatcaaacttggaagatggcggccgggcgcagcagctcatgcctgtaatcccagcactttgggagaccgaggtgggtggatcacctgagatcaggagttcaggaccagcctggtcaacatggtgaaacctcatctctactaaaaatacaaaaattagccgggtgtggtggcacacacctgtaatcccagctactcgggaggctgaggcaggagaatagcttgaacgcaggaggcagtggttgcagtgagccaagatcatgccattgcactccagcctgggcaacaagagcgaaacttcatcacaaaaacaaaacaaaacaaaaaactggaagatggcaaccctcatttaacaaaatggccggttttgctgggatgcagacctaatgcttatggaacccatgatatttcgagatcttccaggaaatattcaggatgttagctacctctggcagtcttcattaaggtcctaggagactcaactcctgggagatggtggtccatttaaaagtggagagggatgaaaatagttttgctaagacagagagtctttttgcctggggcctgcaatctaaagttgcaggaaattgatgagcaagtcctgctgtttgggaaagctgatttatctggctaaagttagagcacaggcaacaaatgaggtgacttaagcaaaagccaccttctcttccttcttttgaggtggagttggtgaggccaaagagtgctggagcagccctttcaccaccatgaggggagccaagcaagaataaagccaacacaaggagggaaagctggacaatccctgaggaatggcgctgcgacccattcccacctgcaggctttggatttctataatgtgttctttacaatttgagccagtttgaagagtttctagagagtttacactattatacagtgtgatgaacactgaaataaaagtatgactaaagtgttgggtggttaagagagaaggtgggttaattagctaagagaagtaagttgttgctttaggcatttagaatggggtgagttggaaagaacccactgcagttcttaatattaagcacactcttttcgtggaaatttatttgactcatctgtggccatcattcggcttctgtttgtccatccaggtaggaatggatgtgtgaaggccttagtggaggccagtgcacctgcatttagtagaccccgggaaatgctggatgatggaaggaattctgccatctgttgccccagtcccttggtgggctgagggagttccccagtgtccatgcacactgggagaagtcaggtatctgctaatcctcctctctccccactgctgtcgcaggagatggacaacatgtctcccaggctgagagccttcctctccgaacccattggagaaaaggatgtctgctgggtggatggcatcagccatgagctcgcgatcaatttggtcaccaaaggtatcaataaggtaattcatattttcttacttctctgacttctcttccctacctttcttcccccagtcctgccagatggcagttcctgccacgtgtccctgtgaagggccatcagagagcaaagctgccgcttggcggggtgccacatgctttcgtgctattgaccccacatgctcaggcagcctcaagggcctgcagatgatgggcacatacacatagaatggcttcagttcagagcagctgggctaggcatgattcacttggtgttcaaacactcagggatcaacagaagtaggtcagccgccggggtctgagatgagctgtcaggatggatgatttaggtgcactccatgcccccatgaagggactcatggcatctcgcttgcccctgccagggcaccagcctggcaatgggcaggtgaagaaacaggagcctggggtctacactagagtgagttattctatgatgtcactctcagcccaagaatgacctcaaggatatccagtggaattggaatattcttttctacgtcattgtttgtttttatggggcttttaaaaagctgcttagggcctcaggagaggatgagacagtcccaaagacaacgcaaagagagtgagcacagacaaggcaggctgtgaactcacagaacatggcacgcccggtcaggagaggcaccagctagagctgttgctcttcattctcctcagtgccccaagtcagtctaccaggcgggacagtgttacagaaacacccaaagaggctgggaactgctgcacacatggctgacgactagtttggtttgcatctacatctgaaccatgagagccatggttttctgattaccccattgctctgcactagctggtaaatactcagaataacaccccaatctgtgagccagtttaatgtccagtagatggtatcatcagaaatggaagtgcccctattgggtagattggattctttcctgccagacgaaggagggagaaccattctctggggaacaaattttaaatgaaaaaatttttgtacttttattatttatttatttatttatttgagacagggtctcactctgttgcacaggctggagtgcagtgatgccatctcggctcactgcaacctctgcctcccaggctcaagcgatcctctcacctcaccctcccatgtagctgggactacaggtgtgtgccaccatgcctggttaattttttgtgtttcttgtagagacagggttttggcatgttgctcaggatggtctcgaactcctggactcaagtgattcaacatacctcggcctcccaaagtgctaagattataggtgcaagccatcacacctgatgaaaaattccttttttaaaaaaagaaatcattcttctttttactttcctattgtgatgtaacataccgaggagaatatgtgttgatataaaggaattcacagatcaatgaatttttacacacatatgtacacctatgtacccactacccagatccagcaatcagatgtctccaaaattccaaatggttctcttgtgcctcttcttggccaaggctatcccctatccttagaggtaaccactcttctgatgtcaaacagcattgattaaatgtgtccataattgtggggttttgtggttgttgttcagctatactcattattttaaaaatgtttttattaaggtataattgacatacatacattaaatttcaccctttttagtacatagttctatgagtttggacacatgcatgcagtgatgcagccgctaccatagtcaagacacagagcaatcccattactcaaaatattcatttccttgtgctcttcatattcaccagcctcagtccctggcaaccactgatttattttctgtagtgttgccttttccagtttaagtctgtgtgtgtgaatagcttaactgtgttttaaatgaggattataggtgggtgggttttagaacaaaaaatgaatgaataatggaaaaatgttaggcatctgaaaacttgcctgtcgagtcagggctgtggggacggtttgtctgtgtgcagccgggtccctggagatgtgctcctcttgtgtccatgacctcctggccagtgcagtgagcactttcctagagctgctaattttaggcactggcactggggctgtcacctgtatccttcgctttgagccgcccacacccgtgattgagatgagggtcactctctccactttaccagtgaggagacaagggctccgaggagcagtgccttgtccgctcccaggtgaactggagcagccgtggattgtactgtcacaaattgcacaagaagatctgtggccaggcggttatgcccggcagggaggaggcttagactaaatttgggggtgagagcctgtatcagggtctggagtccggctgggcctgtagtgagacccaggaggagacccagatgcggcccctccgagatgggcaagcgcttcaaggtgaggacccatctgaagtcagggccagcaatgacagcatcctgggcgggcagatcctggcaggacagggttctcagatttagccaataaagatgctgactcttggtggtttttattttgttttgtttttggttttgtttttgttttgagacagtctcattgtattgcgcaggctggggttcagtgacgtgatctcggctcactgcaacctcctcatcctgggcgcagcctccacctcagcctcccaagtagctaagactagaggcacgcaccactatgcccagctaattttttgtgtttttttgtagagacacagttttgccatgttgtccaggctggtctcagctcctgggctcaagtgatcctcccaaagtgctgggattacaggcatgagccaccacacccagcctcttgtattttcataccttgcctgcaggatacataatcctggcacagggagggacatctttctgagcctcacgtgacctcctgtctttgctggcttctgccaaggtgcagccatcaccctcccctgctccccgtcccaccccaggctggggctcagcctcagtttctttgctgtgcacaaagccaccttgggttccgcccttgcttgtgacggcgttcctggcctcgccccatgggctctgctctctcagtcctttctgcaccctctctgtgcacctgctggaatgcaggcctgtgggccaccctcacacttacctccctgggctccgcactcagccatcggctctctctagagacccaagggtgctggatgccctgggggagatgagacaccagcgcccccgctccaccccgccaatttatccggatgtcctattacctctctgggagtccccttctcaaactcttaccagcccctacattgagtaccttctcctccattcctcctctcacacaggtctttcagctttttttaatggaggatgtggggtgctgggaggggactgttcttactgcctgtccccatttttcccagagctttggcttttggcatgcactggtctctggctcctggtttaagtcaggactttcaaaactattgagtctgccatggatctacctaagcctcttcgggagcttaaaagccatatgtgatagccttcttctgggtgttttgtatctgcccttcccaggggcaatcagcatcagctgtggcctgaggatctagatccagacagcggccgcaggtacctgtgcccttgtccgaactgagatgtactagaaatataaaacacaccctgcagtgttaaagacttagcccaaaaaaggaacgtaaaatagctcatctgtaattattttattgattacacgttgaaatgataatattttggaaatatgagagaaaatatattttagaatgaatttcacctgtttccttcccctttttactgtggctactaggaaaatcaaaatcacgtatgtggctagctcacttatttctgctggacagcactggtctagatgtaagggcgaaagagccgtaagggagaaaggaactgtggaaacagaaaattcatggtgcacatgccaatgaggctcgctgtgcctggctctagctctgtcttgtcttctctgtcccgctgccccatccctgatccctatactacagccagactatcctcgaaccaccctcctgccaacttggagcctctcttgaaatgggttttgaaccccttcaagaccctactcacagcccacctcccctgggaagccttctttctgccaccccacccaacaggctcctttttctgagcagtttgggtttttggtgggtgccccatgttgcgacatctgacaaaagttcgactctagctgggcacggtggctcacgcctgtaatcccagcactttgggaggccaggtcaggcagatcacttgaggttaggagtttcagaccagcctggccaaggtggtgaaacccgtctctactaaaactacagaaattaactgggtgtggtggtacatgcctgtagtcccagctacttgggaggctgaggtgggaggatcacttgaacccaggatgcagaggttgcagtgacctgagattgcaccactgccctccagtctgggtgacagagggagactctgtctcaaaaaagaaaaaggtggacgctagtttgtctgcacatgccccaagagtccacactcacaatgttagtggcacagcttgcctgtgcttttctccctaagttccttggaggcagtggtgggtctgtgttctttgtacttctcttctccctgtgaaaaccccacctatgggtaggtgaattttcagacatcccccgaatgcagaactgtggggcagggccctgtggggcgggtgtgcttgagttctcccacagtgcaaaagtaagtttagcattgcagagaatctggtttggttcaatgctctttgcagacactataaagccatatccttgagcctaaatattcctcctaagagctgcctgaaggatgagactggaggaaatagaagcaacacttggcatttgcttcatgtcaagcacctctaagtgcattatgtatatttatctcatttaatggtaaaaaacaatcctacaaagtacactatttcatttccattttcctgattggaaagtggagacgcatagagaccacatgtggattgctcaagatcacatggggtggtgacagagatgaaatttgaatctgggcggataggctgcagggtctggacaccaagtcattgtgccgtctgcccctaaaactgaagctgtgaggaaggtgcttctcgcgcggcttctcttacctccttaccggcgaggctctgctctccctcgccctcacctccttaccagcgaggcttgctctgctctctctcgccctcacctccttactgcaaggttctgctccctcttgccctcacttccttacaggcggggctctgctctctctcgcatgccggcagccaacgatagccctacctctagactctccatgctcaggggcgtcccatctcctccctccgttacttcgtggccactggtggacaggagcgagactgagttcaggaccagaaggccgcagtgtggccaggccctgcctccatcatgtccccaggtgtccacagcgaagcctctgaaggctccaactcctttctgtccactctgctgggtgggcggtgagacgctgtgctccactgcctgatgtctgagccccacaaggggcccgtcacgtaagtttgggatttttctgcctagggttgccagatcaaaattcacatttcagataagcaaataattttcttagtgtaaaattaaaagacagggaggaggaagaaggggtaaacattccctgaagtgaggattcacaccaaagacacagagtttaagccgggcgtggtagctcctgcctgtaatcccagaactttgggaagatcacttgaggtcaggagttcaagaccagcctggccaacatggtgaaatcccgtctgtatagaaaatacaaaattagccacgcatggtggtgcatgcctgtaatcccagctacttgggaggctgaggcaggagaatcacttgaacctggaaggtggaggttgcagtgagccgctatcgtgccactgcactccaacctgggctatagagtgagactctgtctcaaaataaaagaagaagaaaaaaaaacacacaagagtttaaacctgaaatgacatgaagacttaggcgactggcgagagagaatcaaagaaagttgtgtcactgcaccatggagtctggtggtgattgaagtccgttcagcacaggtgctcaggacctgcggacttgggcagagggcattgtaagcagctagagaacaagagagggcagagacagcttatctctgcttgacaaggcccagcattatggtgagtactgagcattttaataagtgtggatctcagccagctatttaatttttagggcccactgtaaaatgaaaatgcaagacctctagttcaaatttattagggggtgtagtggcacgtgcttgtagttccagctactcgggaggctgaggtgggaggatcatttgagcccaggaatttatggttgccaagagctactgcatgctactgaactctagcctgtgtgacggaatgagatcccgtctcttaggaaaaaaaaaaaaaaaaaaaaaagtaggccaggcgtgatggctcactcctgtaatcccagcactttgggaggccgaggcgggcagatcacgaggtcaggggatcgagaccatcctggctaacttggtgaaaccctgtctctactgaaaatacaaaaaattatccaagcgtggtggcacgcacccgtagtcccacctactcgggaggctgaggcaggagaatcgcttgaacctgggatgcagaggttgcagtgagccaagaccgtgccactgcactccatcctgggcaacagagggagacgtcgtcaaaaaaaaaaaagaaaaaaaggaaaactaataaaaaaataaaagaaatttagtaagaatttccagatgacaagagccaagtgttaaaccagctcagggtgctcttagcaccaggcgctgtgtgaaaacatggctcagatgcaagggaacccaaccctggcataggctcaaactgctgctgtttagcaagaagtgggcaccgcaaactggagggtgattcctcccctgcttgggggccggcccctggaggaacctcactgtttgcacttggagtttaggggcattctgcccttgagcccccatccttttgtttgtttgtttcgagacagagtctcactctgttgcccaggctggagtgcagtggcataatctcagctcatgcaatctccacctcctgggttctcctgcctcagcctcccaagtagctgggattacacgcggctgccaccataccaggctaatttttgtatttttagtagagatggggtttcactatgttggccaggctggtctcgaactcctgacctcagatgatctgcccgctcagcctcccaaagtgctgggattacaggagtgagccaccacacctggccgagccccccctcttacagctgcaggacggaatgtaattccctggcttggccatggccacggccactgtccagagtggtaggaggacagggacagctgctcagggtttctgtgtttctgtgtcacccctcccaccccagtagctgaattctggggagctctggcccaaggagggaaaggggcagcatcttttctccttgattagggggctttctggagccgggggagaaaccaagcgggcatctggcagggccatgatgggagcccacgactccagcttccctggggagcagggtgaagtgctcagggaagaagggagaagggaagccaactttccctcctggaagatgccacagggagacaggagggaaaactgaggagggagtgtcaggttgccacttggctccagaggctgcaagacggggcttcctgtagcattcctggaaagtttgcccagggtccacatgttcccaggcatcctggctgctgagcctgtgggtatgtggaggctctcactaacaggccagctgatgctggcagtgccacttctaaaacgggcaggggatgcattagcctccaggccagactgtggacagttgggaagtgcaggaatagtgcagaggaaaacaggagacttagtacctccacctggggaatgggaggggtgagtacatgtgaggatcaggtggattaaaacgtgtcaggtgtctagcagcacgtggccgacagaagtgctaaaaagtgctacttagcattaactactattattaagtattatcatgaacatttctctttatggagaaagctttgtgtaagccacttactattaattattgttaattattattaatattctctctccttggacacagctctatgtctctcgtttctgttaccttcaccttggcacctcccacacctacgtctactggctcaattaacacttaataaatgttatttttcaaaaacattaatttaaatacatctcagtaaaatccattcaaaatgggaggatactgataaagtaaaatgagatcacgccaagtaactatattgctttttttaaaaaagattaaagtagcagttcagaatcaccacaaaatcctggcttttttctcttatcaacaactggaccatgactaaaaataaagcccccaaaattcaatgcttgggtatattttatgactgggattcagcttttatttgatttctcttcttaaaaagtatgctctctttggttaagatgaagtttgctttattttacataactaaaagtaaacagacaccatcaggttttcctggaaagggcccagaactcgaggcatgggtggatgctggttcttgttggttccaggctggagagcccccaaaaccagccctgagagatgggcgtttaatgtgacctgagctctccagcctccaccatttagtggcttggctagtttctggctacgtggccttgggaattcccttcctccatgtggtccttgtgccttgtcaataatggtgtaataaaactataaaagatgaattaaaagcctcgaggcaagtattaatagctagaaagcttgagaatgccataaaaatagaaatcacagtgcactgagtgcttatcttccatgtattttttatccacagagactgaggaaggggaacgtggacaaggtttagcatgttttaaaccttctatgctcctcctacagaactacagctcccagtatgagagaggaatttacattttttgaatgccttcccatttaattcacttaatttaatttgcagagcacaccgtgtgcattaggaaggtgcagaaactgagatccaggttctgtgggttcttacttcaggttacatgagttgcctgagatcacacaggtggtttgcaaaaacaaatcaatgctaagatgccattcatctgtcagccccatgtgcagtggttctcagcccaaggagattttgcccccaagggacatttggcaatgtttggggatggttatgattgtcgctacttgggtcggggagggagggtgccaccggcatgcgtagagatcaggggtgctgctgaacatcctgcaatgcacaggacagccccccataacatttcaagcattgtccaaaatatcaatagtgccgaggtttagaaaccccgtgctatgggcacagtggcttacccctgtaatcccagcactttgggaggccaaggcaggtggatcacccgagatcaggagttcgagaccagcctggacaacatggcaaaaccccgtctctactaaaaatatgaaaattagccaggcatggtggcaggcacctgtaatcccagctacttggaaagctgaggcaggagaatcgcttgaggcggaggttgcagtgagccgagatcacgccattgcactccggcctgggcgacagagcaagattctgtctccaaaaaaataaaataaataaacaaataaaagaaagaaaagaaaagagaagaaaagaaaagaaatcccatgctacaacaattgcagaagtagtggggcgggaatgtctcttactctgtctgggttatgtgtgtgtttccaagagaaatgcttcactggaggtctgaagggagcttcaggagtgtgctaggccccggctactcaaactgttgtccctggaccagcagcagctgggagcatgttagaaatgcaggcctctccctggacttagactttcagaacccgcattttaacaagctcccacatgattcatgtgcttgtcaaagtttgaagggggcagggtctgactcattccagggtggacggcccgcaaaccagccctgagagatgggcatttaacttggccttagctctcaccagggctaagacccatgtcagggcttcaaggactgacaggctcccttgaatcggccctgctccccctcctttgattgtcacgtgagccctggttgctgggaaggaagagcgcgtctgagctggcttatgataacctttcctgctttcctccctgtctcatcccctccccaggcctacatcctgctgggacaattccttctgatgcacaagaatgaagccgagtttcagaggtggctcatttgctgttttggtgccactgagtgtgaggcccagcagacttctcactgcctcaaggagtggtgtgcctgcttcctgtagacacaaacctcattgctgccccccaccaccctctggggaaaatgacgccttctccacctatgcccaggctccgagtcctcatttgtgtttttaattttaatgatacactcccattataagcagtagttcaagaacataaaacaggacaaatgcaagagaaatgactcccaaacccaccacccagaaaccatagtcaatcctcttagatgaatatcatgtcaaatatctttcagcaaaaaatttatatgaaagaatggataattttatttaaaaataggaattgaattttaagtcagtgtattggtcatctattgctgcataacaaatagtcccaacatgtagcagcttctcaaaacaaacaatgatgctacctcacagggtttctgagggtcaggaacctgagggttgtttagccagctggttctgtctcagggtctctcatgagattactcactgttggcccagcagcagtcatctgaaggctggaccagggctggaggacccacctccaagatggctgcctcacatggctgctggcaagacatcttggttcctcaccacatgggccttcccatcgggctgctcgtggcatggcatctggcttcccccaaagctggtgacccaagagcgagtgagagagcaagcaggaagccacagtgccttttatgacctcgtctctgacacatgcaatatcacttctgccttatactatttgttagaagcaagtcactaagttctcaagggaggataataaaacattcttgaaataatatgcatacacattttaaaaatcacagtttcttgaggcctgatttacatagagtaaaacttacccttttcaggtgtgcattctataaattttgacaaattcaccagcataatcaaagatgtaagacactttcattaccccagggagttccctcgtgcctctctgtagtcatcacttctcccttcccaacgtctggcaaccatgaatctgttttccatccttatagcttagatttttccagaaagccatataaatggaattgtataatatgtagccttttcaggtgggcttctttcacttagcataattcatctgagattagtctattatacaggcttgttaaactcaaaaaaaggtttattagatgctattggtgcccagcccacatcctgtcggtatttgctattctagtagagtccagtgacttctcctagcaaacacttgaatgtcttctgcctgagggtctctctggctacaagagtgggatcagcccacacatagggcagaggggaagtggcaagcagttaatgcccagtgaagcccacagtgatggatgaacagtgatggataaatgtcctggcttaccctgcagataggacaaactctgagaccgtctgtttgagctccctagtggtattgagccctagtttcccacagcggtcacctgctcttgaacagctcatacttctctccttccttgtcttgtttccccactccactaccagtgtttcctggcatcatccccctactcctactccctagaaaatactccaattttagattcaggttctacttctgggagaacccaacctaagaccaaagtgttggaatttagttttattttaatgaaagaaaaaattgaaacgtaaagaattgctgaaatttgatgaattttttcttcatctctggatatagtcataaattattaattcaatttcctctgaatttcagaataatatggaggaaaagagtaagaggttaatatcattaggtttattttaaactcaggttttcagtgaaagatggtgtgatggctaatactgagtgtcaacttgattggattgaagggtgcgaagtattgatcctgtgtgtgtctatgagggcattgccaaaggaaattaacatttgagtcagtgggctgggaaaggcagacccacccttaatttgggtgggcaccatctaatcagctgccagcacggctagaatataaagcaggcagaagaatgtgaaaagactagactggcctagcctcccagcctacatctttctcccatgctggcttcctgccgtcaaacatcagattccaagttcttcagttttgggattcagactgactctccttgctcctcagcttgcagacagtctattgtgggaccctgtgatgatgtgagttaatacttaataaactcccttttctgtccctctagagaaccctgactaatacagatggtatgaattcctgctataaaagtaaaaagaaattgatattcatgattcttctctacttccctcccacttttattggctttattattacttttaatttgtcaaggtttatagcatttatattcttcccacaatcgtttagtcctagttgtgtatctaagagcttatcaccaatccttgttagtatcattattttaaagttcatatctttgtcattcctgaattatttattttgataatgtctttattggttgacttacatcagtgtatctatctgtcagaataggccaagttctgcttctgtaacaaacatctccccacatcttggtgatttatccaacacaggttgacttctctctcatgctacgtgtccagtacatgtcatcagggaactctgtctcttgtagtcactctgaggctttggttaatggagataccctctcaacacacacttccatgattaccacggtggtgggaaggagccatgctgaattacatactgtctgtaaaagcctctgtctcaaagtaatacattctatttgcactcacatttcattggccaaaggaaatcatatggccacacctaactccaaatgggcaaggtcccttctgaatgcaggagaagtgggaacatttagtggcagcactaatcaagaccactgtcatcaattaagtttataacttttttacttgctaatgttttcttgaaaaaacagaaaccaaccaaagtttattatttttcccctgaaagccttgcaggtattatgtttaaggtgatgaatatttcctaaattcgtaaagtgattggaatatttctaccggagtctgttagctctttctagctctgcttttcttgctctcttcaaggaggaaccaaagaatcaagaattccaggagagccagtgggttggcccaaagatttaaatagcttcatcttctgagagctctgggtctcaatagccagaagctttcctttgctccttcttgcatggcccacccttggactaattcttcactgaaatagtcatggtatttagaggtaactaattttctaagacaggagctggatggctctagggaaaggaaagagagaggtaccttcatctctcagtctatttccacatccctccaaacattgttgaaattcatccttctagccgggttgatgtccaggatcatgtaggagggccagggagctgagaaacctggaagagatggggcccccaagactgaaaagcctttataagagagaccctatcacagatattgaagacaagagtagctgttccctatttagtgtaaaaatcttcccaaaggcactaggaactttccccatcagtcactcattccctggtgttgatttttgtcatccttgtagataaaattattggtctaaattcttcccttctccctgcattccccatgtttgtcatgtgactttgcagttcctcccactagaggcagagtgtaattcccagctccttgacttagacttggccatatgacttgctttggccaatggtatgtggccgaagtaaaagtgtgctagttctgagccacatcattcatttctacttgctgtcttgtgcctccaagaggagagctactcccttgtataaatgctgccccttcagcctgggcttcagaatgaaaccaggtgaaactgacctgagccaacctgctgccgggacccaaggccagccagccctgcagcttgatgcaaagccgccccactgagcccagcctacatcagccaaccctcagccaactcataggtttgtgaaggagaacaaaggattgctatttaaagccactgatgtttgggacagttggttatgcagcaatatctaactgatacattctttgtagtctaaaatgtccttaccctgccaaagtgtgccacatcgaaggccaacccaacctttagatggagaagcagcctaggatgcggtgaaaaactttgcttctggagccagccaggcatagccattccagttctgccagtccttaccttatcccgggtgagctacttcaaccttgctgagcctctgtctcctcatctgtaaaatgggtcaagaaggtaacaaccctgccttgcagggcggatcaatgaaaatgcacatgtaggctgggcacagtggctcacgcctataatcccagcactttgggaggccgaggcgggtgaatcacttgaggccaggagttcgagaccagcctggccaacatggcaaaaccctgtctctactaaaaatacaaaaattagctgagtatggtggcacatgcctgtaatcccagctactcaggaggctgaggcaggagaatcgcttgaactcaggagatggaggttgcagggagccgaaatcatgccactgcattccagcctgggtgacaaagcaagactctgtctcaaaaaaaaaaaaaaaaaaaaaagaaagaaagaaagcacatgtaaaggatgaggtgaataggaacatgatgaatggtcactgatggctgttttcttagagctctccttccagtccttgcctcttgcactcttggtcctctcatggcccttgggagagaattcacagctgcgagttgaaagggagccaagatatcaacttatccaaactagtccaattttgtcccaccatatgagtactggacactgtataacttagggattacacactctttaatgggtaggtaagaaataacagatgaaaatcaagttatctcagttatcttgtagggtccccctagcccactgatccccaaatacattttaaagtgtgcagaagaggagtgggcttgcacgtacacccccagtcctgccagtggcatctcttctgcttctcagggccatcgattatttgggaaagggttagtgcctgaaaacatttcttgattgtcacagatttgaccagcttcttaaactatagatgaaatgtctacaaggaagagggattggatgcctcttcctggcctgatatctgtagttctgaggtatctatgaatcaataaatgattttgattaggatttatggagtgtgtaagtatccacaggcactgtgggagagggaggggtaataagtatgagtctctggcttccaggggtggttgattgtgagaatgcagggtcacatggcaaaggtgttgagaggtgtgtcttcctttgggctttcccagaagcatccctgagacaaagatctcagtgaaggtggttgatttgggagctgctcccaggaaagggcaggcaggggagcatggcagatcggggaggcagccaagaaaggtaacatcaccgctcatcatggcgggcaactggcgcccagtcctgctggcagtcctgggagccagtgtagagcaagcatttgaagctaccccacccttgggtgtctaagcaccagtcttatcagtcatttatggaaggctgctcctgcaggaagttcattcctcagctcctgagcctactacctgggaaatgaacctgtgagcaagtgctcaggcaaagaaatgcaggccctggcagtggaaggtgggccggcccctgtcctgaagtagcaaggggctactgaagtagcaaggggtactgccagcccctgccacagatgggttttggaataggacaggcctggctttgaaaagagaatccaccccttccctcccattatgagacctttggaaagccaccctctcaacccagctgcccaactgtagaatggttataatagttcctgctcaagtgttaggaagattaaagtccttgcaccggtaaaatctttatgcacagtatatctaaaaacctatgtattaaaaggtgccgcactacttccggccaaatatgggaccaactttagtgcccactagtggatgaatgaatagagaaaacgtggtatagatacaccatgaaatattattgagtcatcaaaaaggatgaaatcctgtcactgcagcaacatggatggaaacggaggtcattatgctaagtgaaataagccaagcacagaatgacaaatattgcacattctcactcatatgtgggcgctaagaacgtggatctcatagagggggagaacagaacgatggttaccagagcctgggaaggggatggggttggtggggatgaaaagaggttgatacatgggtacaaaaatacagttggaaggaatgagacctaagtcagtagagtgaatacagtaaacaataatcttctgtatatttcaaagtagctggtagtgaataattcaaatgttcccagcatagaaaaagacaaatgtttaaggtgatggatatttcaattaagggtaatcaatcaggggatttgattattataccttatatgaatgtatcaaaatatcacatatgtcctgaaaatatgtatgtctattatgtgtcaataaaaaataatctttaaaaatgtgtggcactgatggtgtattgttatttaaagaaaggagaggttggtgcagaccagagtggtcaggggaggctccttgttggaaatgacatttaagcttgctgttaaaaggggagctcaggggccgggtgacggctcatgcctataatgccagcactttgggaggccaagacagggttagtgcttaaggccaggaatttgagaccagcctagacaacatagcaaggagaggtcagggttgaataagctgcagatagagaagaaggagggggagaagggacagagaagggtctgtgatagggaagacaaacccaactggcctagagggagtgagttgtgggaacggaggaacaggttaggggtggggctgaatcctgtagggccaagaggcttcctcccacttccccctgaaagaagtggcaggtgagctggtagctggcccagtctgagaagccagtcatggcaggattgccatgctggggaaatgttcgtgttctgtagctatcagctgtcagaagggatcagagattccatctgtgctgacaacccagaacatggcagacctgctcctcgtgcctgagaaagatcctgtagtaacggatcctaaaaaatacaatccttcaatcctccttgtacccacaccctttaccaacttctcagctcctcaagccaaaaagtggagtctaactccctactattgaatctgggagtctaactccctattactgaagctggactaaccttgcaacttgctttggccaaaagaatatggcgggtgagacactgtgacagttgtcaacctggggtcctgcttgtgctcttgaacccctgcaactatcatatgaacaagccggggccagcttgctggaggatgggagacacatagcccagttgtctccatggcctgtgtcagcagttagccaacctccagatatgtgagcgaggacattctagactagccaacacatcagctgacctcagatccatgaaagaacccagccaagatcagccatacctggcgcagaccagaaaaaccatctaactaacccacacactcatacacacgaaccaatgttttaagccactacattttgggagtgttttgttatatagctagagctaactgatacaagtcccatgtgaagccttagagtgtggagtatctcctggtatcaaaaagaacctcctattttatcttttagagagcaccctgagtggtatccaggcatacgataatagaaggatcactaccactcacatgcagaaaccaagcgactatagtgggcatggggtgggggaagcaataaaagctaagcactgaacagagtcacttttaaaaagtgcgactctgagaagaaggaggtaggacaaaaccgtgactgaatctcagaaggtgaaacaagacttatcgatggtatgaccagctgtaggtggcctgggtgatttattcctggaaacctcggaaagaaagctggctcatggagataaacctttagcaagtgtgtctggaaatagatacataagttttgaatgtttggtgttctacatgaatgtgaatgttttattccgcaccatggttaattcactttagccccaggaggctttgggggtgctaatactttactaacacccccaaagcctcccaggactgagatgaggggtgttttctctgtctcaaaagcggagaaacttaaccaaagaggttaacacagccatgatgatttggctggtgatttcactctaagtctgtctggcactgaagctgtgcctgctgtctgcagagcccccattggtggtggggagcggatctggtgattctgagatgctcttgggatctcgaagggagcactgaccaaggacagacaggcatcacaagggatgagaaagactcattggaatggtcatggaaagaggaccatgatgcattaagggggaagcagtttactaaaaaagaatcactctacaaatgtttactgagcacctactatgtgcctggcacagttctaggtacaacagagaacaggacagacaaaaaccatcattccttaggagctgacattctatggatgaggcagaaaagaagggttaaataaaataagtattaatatgaatcatgaaattggcacttttttggctgaaagtagctgaatagggccgggtgacgtggctcatgcctgtaatcccaacattttgggaggccaaggcaggcggatcacctgaggttgggggttcaagaccagactgaccaacatggagaaaccccatctctactaaaaatacaaaattagctgggtgtggtggtgcatgcctgtaatcccagctagtagggaggctgaggcatgagaatcgctggaacccgggaggtggaggttgtggtgagccgagatcacgccattgcactctagcctgggcaacaagactgaaactccaccccccaaaaaaaggaaaatagctgaatataggcaatttcatatggttcaacatgatactatgttagtttcatgatgggtgctatgaggaaaataaagcaaagaaagaggtcaagaaggctaaggagagtggggattttaagtagagtagtcacagaaggcctcactgcaaggactaattacagtcaagtaagcagtgaggctgagagcagtggggtagctgggagaagaccataccaggctaagggagcagctcacacgaaggctctggggtgggatgggcccaaggaggggagtgaaccagttgaagagaaaatgggtgggatcagattgcatggggccttgagggtcattgacaagacattggcttttactccagctgagcctgaaatccactggagggccacaaggtcagacacacatttttgaagtatcactctatggtgtttagaacactctggaggagcaagcatgagaagagagaccagttaggaggctacagcatgaacccagggcagaggtgagggtgggttaggccaggatgagagtgatgtcctggtgaaagtgatcagattctgcatctattttgaaggtagggcccctggagtgagtgtaggaagaaaaaagtagaggtcaaggcctgagccctgcacataccaatgtttagaaggcagagagatgaccgaggaggagcgggggttcctaaatgccgtgcgaagaaggtgtttccaggaggagggagtgagcaactgtgtcaaatgctaccgatgggtcagatgaggggagaactaagaatcgatgaaggacagtgtttttggatgctctgcaaaagatcccggggtgggggcagggggaatgaggggggaactttggggatacgggagagagagggaagagctgctgcagcgtgtccttgagtagacaataggtttgggatccaaacagaaggaaagactggccttggctaggaggacacccacagtgggccataggagggaaggcagagcaggcagccctgatgcagagaagaaggtgttgtggtagtgggagtttaaggaatttctcttctggtggcttctgttttctcagtgcaacaggaagcaagatggcaggctatgaatgagaatggggagtaaagatgaagtgtgagctagttgtctaggacagtggaaaggtggatacatttttataaagagaaggtataacaatatagacatatatatatatactataacagtataggataaacaatatagattagccaagtagatagatgatagattagatagatagatagatagatagatagatagatagatagatagatgatagatatagatggattggatgatggatagatagatagagatccattatccatagcatagatcctggctattctatgatacatgcatagaaaaaactgtggaaagagagatgctgaactgccagcagtggttatccttgagggatgtgattaaaaggccctttcacgctccactctatgcagtagtccagcatttaaatttttgcactaagtattacttttacaaatcagaaaaaagcaagacagacatttccattttggaacacaaagcattagagctgtagagagcagggggacgaggtcctgggacagcattctgtgggctcacacccatccttctccctctgtgtcgctgtctcgcatcaggagctctctttctaagccgaagacagcgcctcctacatttctctgtcttggagatttttggatctccttacaccttccaattttaattctctggttacttttccaaggccaaggtcaccttggcgaaatgcagggtggctgtctttctttcttgactcatttctttgtgcctgtttctagcagattcttcaaagctgtgcactggtgcccccttgatagtaaagtctctgttttattttaaggataatctttaactgcacaaactatgctgctttagtgcttggcctggtgattgattcttcttggaccagattgagaagccactgtagccagggcactgggcagagagttagagggccggataatgccattaagtgggtggggggccaatgacaaaacacttagtttgtctgagttgctgtttcttggactgttaaatgagaaaagtaactgattttcttacctcctagctttgttttgaagaaagctcaaaagtagacatgaaggcattttaaatagaaaaggaggtgaggtggccgagtccggtggctcacacctgtaatcccagcattttgagaggctgaggtgggtagatcacaaggtcaggagttcgagaccagcctggccaacatggtgaaaccccatctctaccaaaaagacaaaaattagccaggcatggtggggcgtgcccgtgatcccagctattcaggaggctgaggcaggagaattgcttgaacccaggaggaagaggttgcagtgagccaagatcacaccaccacactccagcctgggtgacagagcaagactccatctcaaaacaaaacaaaacaacaacaaaaaaaagcaaaggaagtgaggtgctgtgcagcaatggaacatgcagttattgatatattttactttggacagcagctgcagatgactaacattggtggcagctcctcagacctcaccgtctgtgtgcatgagtcagtgcaggctacgctgtgctgtgatagcaacaaccacccccaggagctcagtggcttaggacagcaaagctgtctatctcatgcccattccgtgcccatctcaggtctgctgggacagctctgtgttgtcctgtctccacaacctgagctgacacagcaacctcatcttgaatgtatgcaggatacttcagcagaaagaagtgtctcacactagccattaaatgctctggctcagaagtgacatgtcactttcactaacaaacggctggtcagcaccagtcacatggccccacccagccccaaggggaccaggtagtgctgtctgctgggagaggagagaatggaaaattggggtgaacatcacaaatcactaccatgtgaacctatcttgggagtgggggtgagagtcacaggaagtccccgagaaggctctgttataggcaatgtttgccccttttttgtctttttacagatttacaatgactgagtttcttaaccaatgtgcgtgggtacgatgaataaatcgtggatttacattgtgaaaactttggaaaatataggggaatgtatagaagaaaatgaataagttaggaaataaaccctatcatctaatattttatcggatttctttccagtcttttttcaattgcctataggtacatttttaaataatagctttatttcaataaaatttgtataccataaaatttgttcttttaaagtgtacaacttggtggttttcagtatattcacagagttgatacaactctcgccactatttgattttagaatattttcatcaccccaaaaaggtatccccctagcagttgctcccctcccccagcccaacccagcccctggcgatcacaaatggactttgtgtttctatggatttgcctgttctggacctttcatgtaaatagaatcacatgctgtgtagtcttttgtgactggcttctttcacttagcatcatgttttcaaggcaaatcaatgtcacatgtatgctgtatattttcaaaagcaaattgagaggctgggcgcagtggctcatgcctgtaatctcaacacttgggaggccaaggcgggcagatcacctgaagctaggagttcgagaccagcctggctaacatggtgaaatcctgtctctactaaaaaatgcaaaaaaatttagctgggcatggtggcgcatgcctgtaattcgagctacttaggaggctgaggcagaagaatcgcttgaacccaggaggcagatgatgcagtgagccaagatcacgccactgcactccagcctgggggacagagagacgtctcaaaaaaataatttaataaataaataaaattttaaaattttaaaaatgatcttatcaaacataagttatcctgtttctttcatttgtatgctttaaacattttccctcatcattaaatctttttggaaaaatggctgttttttttttttttttttttttttttaagatggagtctcgctctgtcgcccaggctggagtgcagtggccctatctcggctcactgcaacttctgcctcccaggttcaagtgattctcctgccccagcttcccgagtagctgggacttcaggcgcacaccaccacaccaggcttatttttgtatttttagtatagacggggtttcaccatgttggccaggctggtctcgaactcctgacctcagatgttctgcccaccttggcctcccaaagtactgggattacaggcgtgagccacctcacccagcctgaaaaatggtttttaacggctatgtgtataacaatccatcaaatttgtgtccaataatgtgttgatttgtgccttctctttttgactttttggctttcagttttttcaccattacaatcaaagcttttatgagcagctatatacgtattttttaaaaaatgaatgagtgaattctaaaacagaaatctttgcaatattttccattcttcttttaaggaagatgcctaagaatgcatttaactgaataagaaggcagaaacatttttaagacttttgattcttactgcagctggtttttctagtcaccaacctggggactggcttcatgttagtctgatgacatcctaccccatctcagagtaaaaccaaatttcttaagatggtctggaagaccctgcacaatctggacctattccttctctcatctcctctccaccctggccataccggccccttgttggtccttaaacacaccagagccgcttgttggcagagaggcctcccagcctctgcacggctcctcctgtgcctggagcagccttccccagcctccacccagctcactcaccctttaagactctgcttacactttcgcaggaggccctctcattaaaaacaccgcccctatctcctctaccagctttataaaatgttttttcttcacagtagcccttatcatcttctaatataattttaaaatgtacttattttattatgtcaacccattcaaattaatcactagggcctggccctgtgcctagtatgagtaggcatgcaataagtaagtgttgaatcaagccaatggccagcactgagagctgggggcctctactgcccagccatccgaccctcttccccggccatcagtgggagctctggtgttctactaagtccccgtcagctgttccttcttgactcagctctggagcaaactagaaagacaactgcctcaagggttgtttgttctgccttgtggtgaaacctggaagaggttgaccctgagagaaaaattcgctcgtgactggggtgagcaaaggtttgtttctgggaggcgtgcaaagcttcccagggctcacacagggtggagccctccagggacccccagtggcccacccaacttccagaccctgactgcccatgggacagactcaggtgctgtgacctcaccaggacctgccagggatcaaactctcatgcccaaacaaggacggcagccccctggtgctcctgaaagcaggcagtttcctgaacagccacaatgtgacccaagcgatggggcgggagaggaagaacccacgggaagcagggaaatcccttggctggctgagtccggcaaagccgcggggacctctcgggaacctccccattgtgtaacacttccggccagtctccttaggcttccagggcaggcacaggatcaaaattcccaaacctaatacagttatgtttttaaagtgtccataagtcaatggacaaacaatgccccataattaatggcctcagggttgggccctcagcaaaggaagcaaaatcagagctgctcggggtcacccacaggcaagcaggcccctccttagaccaaagggcttctctctcactccccataaggatgttgtccacccaggcccctgggggcccagccactactgaggttacccactcctggctcagaacattctggaattcctcctttggaatggccactagagccccaagtggttctctatactattctcaacatggtgacgacccatttgatccattctcaacaagtcttctgaagatccatttgagtgactgagttatggaatatggtctcttacaaaactctgttgaagtgtaatacccacagaaagatgcacaaattattggcgaacagtgtgatgaattttcagaagtgaccacagccacttaactaccacccaggtaaagaacaggacattactggcaggcccctcgggccccgtctcagacgggtccactttcccacagctgacatctagcagcagagagcgtttagtctatttatgaactttatataaatggatgtgtaaaatatgtgcagttctgtgtctggctcctttccatgttatgttggtgtgattcatccatgatattgtgtgcagtaataattcattctttctcgtggctgtatagtattccattgtatgaatagactactcattggctatgacagatagtgctgctaagcatattcttgtacgtgtcttttggtaaacacatgctctcgtttctcttgggtgtacttcaaagtgggattgctgagtaacaaagcatatgtatgttaatttcattggacactgccaaacagatgcccaacatggttggaccaatttatactcctgccagccatgtacgggaagtctgcttgccccaaatccttatcgacactgggtgggtcagtctttttagtcttatcaattctgggggaggtgtagtagcattaaatttttcaggatttttaaagttaaattttaatttttttagaggcagagtcttgctctgtgaccccaggctcagtgatgcaatcatggctcactgcagcttcaaactcctgggctcaagtgatccttccgcctcagcctccggagcagccgggattataggtgtgtgccaccatacccacatttttcagttttaatttgcatttagaaatatggtcttcattgttaaaaatcttaacgtgtggctgtaaaagacggaaagggacatccgcattgtaactaaaaggctggtgggacagtcgcttgctgcctgcagagtccattgaataagagcgaggtccgctataaagaaattgatttattttcaaagctagcttacgggaagaagcactggtgtccaccttgcctttgaatgtatcacttcatttttggaacagaaagtgggcacttttaaaaggcaggggaggggctgggcatggtggctcacacctgtaatcccagagctttggaatgctgaggcaggcggattgcttgagctcaggagtttgagaccagcctgggcaacatcatgaaaccccatctctacaaaaaatacaaaaaattagccgagtgcggtggtgtgcacttgtagtcccagctatttgcgaggttgaggttgcaagattgcttgagcctaggaggtggagattgcagtaagtggagatcgcaccagggcactccagcctgggtgacagagtgagaacctgtctgccaaaaaaaaaaaaaaaaaaaaaatttgttttaaaggcagaggaggaagcaggcaaggtgaggggtccgagtgttagcttggtgtctaggtggttgagctggtggtggtaccaggtggttgagctggtcactgctggtgccctaatgggcaggctgttctcttttgaggcaacctcctggagggtgagagtttcttaaggggcatgctttggtttgtaaattgactgttaactctcaagagttctgtcttggagcatgtagatgaatttgccctgtagggagtctggtgaaggggaggaaaaaggatatatttgcatttctaaacggctaagtaggaagtggggaaccaggggaatgagaaaagacatagaaaaaaatacttaagccatctcttagaaaaatgggggtacttacttacaatgttgggtttgtaatggggctgtgaagatagccccagtacctggaatcggggcagcactatgccagtaagtgcccaatgggtccactcacctgggagcagaaggtctgatatcactactaatacatcagtcctgtaccatgtaagcttgcttcaaaaattccaatcatccaggggctttcagagacttacaaaaaaaggacaattctgaggtctgttgaagttccctttgccaggatttgcagacacttgggctgcagaatgcagtgcctctccaggggctggggactggggagggaccatggagtactctgttcatgcaggcactcagaatccccagaaatagtctctcacactacgtatctctccctcaacctcaagaatctggggtgcccatggagagaagcttggcccctgttccaaaaagtctgtgtgatggtgagggtgctgcctccccaggaaggtctcaaggcactgtcctaatatcccaggcaggccatggaggatgaaggggtgacaagtgacagcccctttttgggaaattaccaatagctcagcgcagaagtgattatgtttgtcaaccctaaagttgtagtctcccctcctgtcccacccatgtcctgttcaacattagtcctgtccacaccaactccagaatgtaccgaccatcttcccacctccatagctcatgccacacactacttctagttggaagaggacaacttttctccaccagccctgtttccacaccttcccttctactcccctccctaccctaggcctttggtccgctgcccagcagccagaagaattatttaaaaaccaaattagatgatgcagtcacatctttaaaactgcaacaccctttcattgcacttggagtaaaattcaagctctctgaggcttcactgggtcccatgtgacctgtgcctgtctctttctcagacctcgtcttgtacgcctgcccccttatcttcaagacttctttctgatccttgaggtagaccagttaattcctgcctcagggtctttgcacattctgttctctccacctgcaatgccttttccactggtatctgcataaagttcaaatgttgtctcttcaaaaaggcccttcctgaccactcaacctccagtcgtctcctcctctggctactctgtcatatcgccctctttattctcttcatggtgcttatcaccctctaaaaagatcttgatttgcttccaaaatgtctgtatccccatctccagaatgtaaggtggtatatccccagcacccttaagtgcggcaagcattctgcaggaaacccgtaggtatttgctggatgaattctaacatgcttccattagcggcaggggctcatcctatgggtctcctccctttctctggttccaacaacttgtggttgaatcggtaccatggctcacaagccactagcttttcctacctcagctatagcagtaccaggaaggtgagctgtccctactcacatatttgggcagcaaattgagaggatctgctccactcctgcagagtgtgtctgtgtccatcacagagctgaaccgcctttgtgttgatataagcaaactgaggcacacacacttttttttttaaattgagtacctacgtgccaggcacagtgctaagcaccagagttaaagagagaaagttcacaatccctatcctgaagatgctcacagtttagggttggggaagaaaaataaccagacaagggcaatgctactgggttcagaggttgcaaacatgagtgtctgtgggaaccaggcaggtgctgtgtcccctcacccatctcgggtctcgccggtgatgcagtgaacaccctcaggtgcactgcagctctccacttctctaagggtttgctgtgtttgcacactgggcaagctgagaggaccagggatggatcaccccaggggtggcctgcagccaacaagagatggcagctggcgataaataccccagccgccccacccctagtgggaccattctgaggcatgttctatgatgtttctcagaggtgcccagtagcattgagccccacttgcctatgggataactggtccattagcaccctatgtatgggctttctctcctccctgtctcacttctccaacccctcccttgtgcttcctggattcacctcccaaataaactacttgcacccaagttctcatctcagggtctggtttgggaggaattcacactaaggcagtgtgaagcagctgggtgtcatacaatagggaatggtggggactgtggtgaacttctgtgctccctaaaaggtagcagctgacactcagctcctggctggtggtggccaggttgccatctccttcagtttttcaagagttgcatccagattttcacgtggtatctctcaactttttaatgtcataataaattcaaaataaatttaaaatactatacagggcaaagaaagcacatcaatagcataatctgccatgtagaccataaatttgctgcccctggtgagctcaatcaagatgtgtagaggcatcatggtgactccaacccagacttacccagcaagagagtaggcaggggaagcttcctgaagggtgtgatctttgagtggggtcttgagaaggagagagataggggaagaagatgggaaagggcaggaagggaacataggcagggaagagaaaatggcatgagcaacatgtggagaattaaaaagggggtcggagctctgagggatgaggaaagagaccatggattgtccagaaagatgagagagatgagtaacagtccactagatgccaggcatggtattaagcgcttacgtgcatttttcattgcatcttcctaacaggagttgaaattattattgttcactttacatacagaaaaactgagacatagagaggttatttgctcaaggtcacacagtcagtcaatggaggaacctgggctggatcagagccttcttatgcttaggtggaatggggccagatcattcaacacctcacgtattactctcagatctttacattttattccaaccatggtggggagaccctggagaatttaagcagggagggtaatgtcactatgaccacagcagggggaaggcagagggtaggaggcagaattgggggcgattgcatgaatcaaggtcagaaatgatggagtctcagctaagtcagtgttggggcatgaaatcaaggagagagattcaggtgcagaggacactaatgtgttctattttggacacgtcgagctggaggtatctctgcagcatctcagggtcaactctctgtaagcagatggttctatgggtctggaaggcaggaagagactcggagtcattaggacacaggcagaagacatggctgtgggtgatgtttccatcaaggaaggtgggaaacggaaagttgctgagacagaatcctggggagctgcaaggtttcagggtgaaaggatgtagaagaatgcacaaagaacaccaaaaagtaacagccagagaagcagaaggggaccagaagagagcagttccatgggccactgagacaggagagttcccaaaaggcagcatcaaattcttccaagatcaagcaagaaaatggctgaaagtgtccatgagatttggcaacaaggaagccattggtgaccttagcaagggttacttcagtggggacagaggcagattggggtgaggtaaggagtgaacaggatgcgggggtgtggagacggtgagagtagaaatgattctacaggccgcctcacccagggagagacctaggcaggctccaaggccgttcagccttcagttcacttgtgcaatgctgcatgtgcaatgggtatttaaaaacgtgtatttctgctttctaattccagtaggtaaacaaaaagaaaagaaaagaaaagaaaatttgtgtttgtgcgtcagcacttcctctgcttggctaagttttgggagaacaccttctctccttcttttactcttctttgactttctctctcttggaaagtgcttacacctgcttaagaagtgagtgtccgctcttgatccctttgagtccttagatgattttaaaccttcattagagatgaggggggtgggcaggacccgtatctttctgcttctcccttcaggtaagtaatctagagtggcacatgcgcactgatcatcagtacccacctgccagagtcacggagccttgccatcctccattgtagactgcgtcacgaggttggcaggacacctccacatccagcctgggagaggccgctgccacctgctgcactgctcatgcctgacccagcagccgctgtcattggcttgaagaaggaagctaaggtgttagaaaatgtaatgcagtgattcctgtcatttgctgttttgctcatgagtgcgggaaaaacaagaagtagagccgatgacaggtgggaccctctaatcgggctggtatagggggaaggtggatttatctaagtccatccttttaggatagtcctcagtacttcagtagctgacacttgaaaccaattatctagggatatcttcatacagattcattcattccattcattcctccaacaaatctttgttgagatctattgcagactttcttcagtggctacaaattatttgacggtcttcccataagtaactgaggtatagattccctagtaactactgtggccagcagaggattgtggatgttctgctttgtgtccagggctacacagctttagcctagttccctgagaggttatgctaccttgtaagccatctgactgtcctgaggttgtcaggctggggccgcctacaggtcccagtccacattcccaactgatcccagtgtctcaaccattccagcccagggcccagccaagagagggaggtagacttcttggaagtagaccctccagtcccagctcttcaagtcacccccagccagtccagttttcatgaggtctcagacatcatgaaacagaaacatgctattcctcctgggccctgcctgaatctgcaggcataataaaatgcttgttgttttaggcctctacgtttgaaaaggccattatgcataatagatggctgaaataagaacctactgtcattaggtgctactccaggccctgcagataagcaataagcaaggtagcacagtccctccctatgtggggctaacactctcactggggaagacagataatgaaaacaaacatggaagcagtgactcaatgctttagaaaaataaaaccagggaccatgagagtgactgttggacaatcttggggagtggtagaatcaaggaaggtctatctcaggaggtgatatttgggctgaaaccttaataagaacaggaggatcagacagaacagcaagaacgaaggtgctaaggacgctggaggagcggacagcagttggggaaagtggagagtggtgaggaagggcctgagtgaaatgagatgaagctggagaggcaggtgggataccctgcagggcctgtgggccaggcaaggaggcctgtactttaaagagatggccctggctgatgtgtgggggatgagtgagggtggaagcggggacactggtaaggagcctcatgtggtaatccaggtcacagacagtggtggctgggacgagaaggtcatagtggagacaggaaaaagatgaagtgacactgtgtgttcaggtggagctgacagctctcatgaatggattgactgcagaaagcaagagatggagaagaatcaaggacagctcctaggttttcctatgtctaataattttggattgtattctaggcattgtggatgctattttgcagtgactctggattctattatatttctgaagagcactgatacttgtttgtctgcttacttgttttataaagccataaacttggctctctctactccagctgccaaccctccctctcagtcagcaagttgaacctcagctcagttcttttagtcttggctgggctattggaagtcttgcacacacgtacacagttgagggatcagccagagatttggacagagaaaacacacagaattcagggcttctcctcactggtcctcacctttctggggctcacctctcactttctagcagctgtcattgcccagactctaacttttgactctccaagccagaaagatggcaggttttcttttttcttttctttttttttttggagatggagttttgttcttgttgctcaggctggaaagcaatggcgcagtcttggctcactgcaaactccgtctcctgcctcagcctcccaagtagctgggattacaagtgctcaccaccacacccggctaattttcaaatttttagtagagacggggtttcgccatgttggccaggctggtcttgaactcctgacctcaagtggtctgctgccctcagcatctcaaagtactgggattacagacatgagccactgagcccagccgacggcaggttttctactggaattttaaccaccctgcatagttcaggccgagaaccgctttcaggctaaaagtcataaaaacaaaatagcaacctctttctatgccattcctttcttccaagtgcagagcctcctcctgtttctgcctgcttttgttcactctgtaatgcctttgggcagttgttatttttattttgagataattacataatcacatgcaattgtaagaaataatacagagatactccctgtactgtttactcagtttcgcccagtggcaacatcttgccaaactatagtacaacatcaccacaggatactgacactgacatagtccagatacagaacacttccatctccacagggacccctcatgttgcccttatacagccacacccactttcctcccacattacttttcctttaactccttgtaaccactaatatgttatccatttctaaaattttattatttcaaaaatgttatataaatggaatcatacagtatgtaaccttttggggaatttttgttgttgcttttttcttagcatgatttcctggagattcattgaagttgcatgtatcaatggttctttcctttatttcatggtgtggatgtgccacagtttaaccattcactggatgaagtccctctgggctgatttcagcttttggctactataaacgaagctgctatgaacattcatgtccaggtttttgggtgagcataagttttcatttctctggaataaatacctaggagtgcaattgctgagtcacatggtagttgaacgtttggttttttaaagaaattgccaaattattttccagagtggttgtaccattgtaaagaccaccaatcatgaatgagtgatccagtttcttgcatcctcaccagcatttggtgtttgtcactaatttctgttttagcctttctgataggtgtgtaatgatatcttctcatgactttaatttgcatttgtctaatagctaaaaatattgagcattttttcatgtgctcatttgccatctgtatatcctctttgtttaagtgtctgttagtttctgagctttgtttttgtaaaggaaaacaacatatacaattctaatagatatgtatcctacaaaccttcacatttgtagtctgtctgtcttcttccagtgaggctgccacagtcaggacattttgccctagggttcaggagatgattgtgagtctaaatcaccctcaggtcagtgaggatggccaggaagagaggaaggagcaggaagactttctcgtgtccttaagcagaggcctgcggataagatttatcctctctctctctctctctctctctctctctatgccattcctcattttctgatggtaaacagaagctcccagcccagttgccggttcccatcccttcaatatcttccttgggcatcctttcccacagcccctctcaaagtcacaaaagctgaccccattgtattgcacatagtagattatccataaatatttgggtttggtggatagagtttagttggaattcctggtgtggtatcacagaaatccagttggagattgcctggtccagaggcagaatctgtcagaaagagtcatttctgagatatattaagtcagtgtgggaaggacaggagcaagccttggtctcaggcagctggaatctgcaatccaacccagccactactctctctgtttctcatctctgtcctctgctcatcagcttttatgctctgtgactgcagattgctaattccacaatgcaaggaacatggtgccaccagccctggagcctcccagaaagagggcccgaccctgttccagtatttaaagtcctggggagagcaaggacaggctcagtagtggcaaaggggtgaggcaacacgatggacagtttatcaaattgtgggagtgggagagcaagaggtcctcaaagtgggcaggccttgcagactcaaccatacctgtttgctccgagtttactgcaaacattgaaggttccagtgagacccttggaaggcacatgaagctcactctcccaatctggaaagtctccttgactccagcccaaatcttacccaagtttcgaggggccattcaggtcagcctcctctgtgacctccttcctggggtctaactctccatgacgttctctgtgagtcagaataacactatctgctgtaacaaagaagcccctcccttgcagtgggttaacacaatacaagtattttcctgactcacttaaaagtctaatgtgtgtgtttgaagttaatctggggatggaaattctcctctgatcttgtggctccacatttccccatttcagagtcttctgcatttagccaggaaaatggggaaagatagtggagaagaccctttcttaaccacctcactcccattcacattctagtggtgggagcgggtcacatggccatgcagggtgcaaggtgtgatgggaaatgtagttcctggtgcacaactgcttcccagccatgatgttataccacataaggagggatgtatgttttggtggactgttggctgacttgccacctcacctcctgcccacacagtcagctattcatggacgagtgcctcgacctctgtccctgcttgctagtctcagtgtccaagacacctgagtctttgcctcttgttacacccagagacccagcaggccaatggattccagaaagaagatgattggcttaacccaataccttttaaaaaccaaattggcaagctacggcctgcaggccagctgcttatttttgtaaattaggatttattggaaccagggcaaggatgagggtgaggtgagtgaggcaggattaggccagtgcaggatccaatcccatctttatttaaaattttaacattttgctcattatggattattttttgcattcattttgattttttaaaatattactaaaaatgttatttatcttgattaccaagtttcttggcgcccccttcaatgctgcaccaaggcctcttgccttacccagccctggcttcaccctcccatcacggtttcctactctgaatgcctggcatttggaaatgtgcccagctctgtctgagtgaggctggtgcggtaaaaagaggttgctgctttataagcaagaggagagcacaggccgccacaggtgcagggcaggtgtctgaggggaggggctgggccagaggctgctgagaaacccaccatgggcctgctgcttgtcctggagaagaattactctcctatagcctcctttcacccagtcccttcaccgcgcttggccagcaggaccagaaggccttggctgtttgaggactgcggtggaaaggtcctggttggctcctaggaggcctccctcctccttccaaggctcctgctgcctctgaagtagccagaggcctcacttatctcatttccttggagttatgttgagttgagctctgtgaacctttcaaattgaagtcacatctcacaattatttggtagaaaaacacaattgtcacctatttgaagatacagattttttcccagagctatctggtttcacttcgcaggccccaggtttcattcctttttgctttgtagctgaatttgtttttgtggttctctctctctccctctttttgtctttgtctttcgcagtgtgtctcctcctctcttaatctctctcccagtctttactctcctctttccctctttttctttctccctccctccttctcttcctcttccctttctttctctcattctgcatttctatcagccataatctctctccaccttcccggtctttcatctctgtcttggcctctctctccctcttgctctttctcagtctctctgtctctcactctctctgtctatctctcttgctgggtttgggtggtgcagacaacaaggcaccaagtaggacctcagggttctgtctcctcccaccaccatgatcccatttccttcccctccctacagcgctggggaggaagaaggaatgtggtcctgcaggatccaggctctggcagtcctatctgtgaaggtcattgggagaagaggaagtggcaactttctttaatatgaaaaaaagaatattttccaaccaaaccatacaccttgtaccccaaatgagaacgaccgaaagccttagaaaaccacagcctgccctttccccaagagaaaactaaccatgttctatgagttaatggaagttgacctccacatgcgctcaccccatgcccctgcaattctctcctggacataattaaggggaaagcattttggccgggcacagtggctcacgcccataatcctagctttgggaggctaagacatgtagatcatgtgatcagagttcaagaccagcctggccaagatggtgaaaccccgtctctactaaaaatacaaaaattagccaggcgcagtggcaggtgcctgtaatcccagttactcgagaggctgaggcagaagaattgcttgaaccctggggggtgggggtttcagtgagctgagatcgcaccactgcaatccagcctgggcaatagagtgagactctgtctcataaaaaaaaaaaaaaaaaaaaggaaagcatgtctatggttaccaaaagacataatcaagaaggctcacagtggcattagtcacagttgcctcaaatcagaaactactcaaatgtccatcaatgataaaatgaataaatacattgaataaatatggctcacgcctataatcccagcactttgggaggccaaggcaggcggatcacgaggtcaggagagtgagaccattctggctaacacagtgaaaccccgtctctactaaaaaaaaaaatacaaaaaattagccaggcgtggtggcgggcgcctgtagtcccagctactcgggaggctgaggcaagagaatggtgtgaacccaggaggcggagatggcagtgagccgagatcgcgccactgcactccagactgggcaacagaacgagactccatctcaaaaaataatcataatcataatcataataaatgaacagataatccatctcatttgatggaatattctccagtaataagaataaacaacctaaaactctacacaaagacatcgtgatgagcaaaggaagccaaatacacagagagcacttgctgggtgctgccacatttataaagtgcaaaaggcaaagtgaatctctgctgtccactggcggcactgcctcagcagggcacagaacagacagggtgtgaggggctgctgggggctgggatcacagtggttcttgacccgggtcctggttacctaagtgtgttcagttggtgagaatctgtcaggctttatactatggcatacatatgcttcaggctacttccaatcatagtagaaggcgaaggagagctggcgtgtgcagatcacatggcgagagggggcaagagagaggaggaggaggtgccaggctcttttcaacaaccagctctctcttgggaactaagagtgagaactcactcactctcaccaagccattcatgagggatctgcacccatgacccaatcatcttcccccaggccccagctccaacactggggatcacatttcaacatgagacttggtggggccaaacaacaccaatccaaaccatagcagctactgcctggcctcttggacttcatgagaggtgaggaggtataagaagggtgcaggtccatcaggctctacagcaacccccaagcctcctgaatgtcccccagggcaggggcagccttcgaagatgacccgcctccctgacctgtctcataccagagtagctgagccacatccgatgggggcactgttcttgtctccaggactcaaacatttccccagccacagtctagcccaggcatatgctgcaatggactccaggccaggcccagccaaggctgggtaggtgagccctgcccctccagggaatgggtcataggcccctgaggaggagctgagacaggccagctgtcaccagcctgccagggctgccatgctctgaggccaatggcactcctccgactggctcagctcagccctgtttctccatgccacagtcctcacagcctccggagaggccagtaggtcccagaaactgtaccagatgctgcaatacacccctctcctcacagcgctgacatataaaaagcaaatgaataaataagacactgacaatttgtgacaatttaacaggataataatagatacacccctaatatctgtagatgatagacaagcgatccaatggatgttaccggtccaaagcccacaccctttctatgctccgaactgtgtctgaaggagctttaatacaacccaagttcacagccacctcccaccaccctcccctccacgggtacacatgcctgtgttgcaatctgcccatgggaaaacagacccagagaaaaaagccctgtgcagccctgggggcagggctgggtggtctgggtcgagttagggtcccagggctccaggctgtgaccagatggagcatgggctctgggtgaaaatctcccatcagccccatttgttccttccctggggggaagggaatggccgagagggcaggagtagggctcgtggctttaatggcagaaatgattatattaactgggatagggactacctgggggaggagaaatgccaggtaggtgccagctatgcaaagacccagaggaagaacattccaagaggatgaaatggcaggtgccaagaccctgaggcaggatggagtttatagaaagacggccagtgtggctggagcagagtggggtaagcagggaagattatgcagttctcagagaaatgaaggttttattttcagagaagtggggacctactggatgggttttggtttcttccatattgaggtataattaacacacaataaaatgcaccagacttaagtgtacagatcaacacattttacatatatatacacccatgaaggcaccatcagagcaagacagaacatcttcagtcccctcaagggctccctatgtcccctcttagtcaaaagctccctctagtataaccactgttccagtatctatcatcgaaggcttgctctgcctgtttttgacctttgtataaatggaaacgtgtggctatgtgctctcttacatctggtttctttctctcaacatagtatctgtaagtcacccattttaccacgtgtagcagcatgtacatcatggaaatgtacatgtcatacctcttaagtgctatgtatatatcctgttgtgtgaatatatcccaacgtatttatccaatctcctgttgataggcagttgggttgttcccagttgggggccatagtgaaagatgtggctatgaatattcttggataagtctgtgggtggtcacggtgctgtctctgtggggtatacagccaggagtggaactgctaggtcatagagtagatttacggtgaccttagtagattctgctaaagagtgttccagagtggtttgagaatttgaaggagagttcccagtgggaagctggtatgacctgatttatatttagggaagatcagcttggcactttgtagagaagagctgtaagggggtcagagtggaggtgaggagaccagctaggaggtgatggaagggtctgggtaagccatgacggaggcacagccgtggttggtagcaatgaaaggaagaaaagatgtcacctgcccttcaataggaaggacacagggataagctcagttgtccacaaggccgagcacaaattagtccttgaacccaggaattctagcataacccagcattcctccccacaggtctctcttgggttcggggtcctgtctcctctctaaaactcttttaactatgggatggcagcccccagggctcacagagctggtataggaagcttcagagagaataaaagacctactggagacaagcaaacctctctttccccccaagcctggaagtcacttgaaagtccacttgtttttacacattttttcttttgagacaaagtctcgctccctcacccaggatggagtacagtggcgctatcttggctcactgcagcctcgacctcccggattcaagcaattctcctgcctcagcctcctgagtagctgggattacaggcgcctgccactacacccggctaatttttgtattttcagtaagagacagggtttcgcgatgttggccaggctggtcttgaactcctgatctcaggtgatccacccgcctcggcctccgtaagtgctgtgtttataggcacgaggcacctcactcagctttacacatttactgatagcccctgctcagctcccaaaatgctccatctccttggctgcccctgtgctctctctggggttgggatcccagtagcaaacactcattgtttccttaagtgctgttcacagtctgcaccaagggcacgtgctgcacactgggaagagaggccatatcatgggctcttttctggcacctgtgagcagccaggtgtagggtggggcagggtagtcctcctctgccctcaatgcacagagcctgggagtccaacaacatgtgggcttcctctagagcctggtcaaaatcctcctaacattgggaccaatctggaaatgaactgcctttactgctcattatgtagtagtgatgtctttctacgtggcttcgttctttcttatcctttggatcctctggaggtgtcagtgcagggtattaccagggctttctatgaaagggccagaaatccagttctaactggtgtaaacagcaacacaataaatgtgttggtttatatatccaagaagcccaggggtgttggcttcaggaatagcaggctacaggtcctcaaaaatatcagaaagctcctactctcattttcatctcttcttttatctcttttggctacactttcaagctacttttctccatgtgataaaaggcatggccaccaacagtacaagcatgtcttgcctgcttattaataccggtggaaagggaagggcttctttcccaagcagttcccaggagtggcttcccttagtctaacatgggttgtgtgctcagcctgagccaatcactgtggccaagggcactgatgtgctgagttgccacccgggagccagagggtgcactaagagagaaggaggggttcccccaaaggaaactgggtactgtttccagacaaaggagaagtggtaaatgaacagcccaaaacagcagattttaaaaattaaaaataaataaataaataaaaatatggtgtgaaatgatgtggctagaaaaaaataaaataaaataatatcaggtggtcttaagctttcctttcaggaaagttgctgataaatcattcgaggcagcctaagaagaatggatggatcaataaataaacagatgaaaaagggaacaaatatttatgggtcacaatattttaagttacttgagagccagagggatgcattttccagggcctagcccagggcttggcacggtattagatccagggcaactaatgcctgccattcacatggaagacatgatcaggagatagctgttctcttccctgctgagtccagaccagcctcagaatccttctcaacacagcactccagatgaaactaactgccatccttttcaaacgcatcacctcccctcagaacctgccccagtcccctagaaagtgctcaacaaaagcttattgacatggacaaggtatccactgtggtccacaccctgtgacaggcacatttgaacaccatcagctttctaatggaaagctatctgccgctgcatccctttctctggcaatcttacctttgcctaagctctgataagtgttgacagcatctgtttcaagagtgggtttgcacacgtttaaaatggcaactgtctctgtaccctcagagtcccagggaagaccttacagccatggtgtggtggtacctgtgcaacaaccagctctcaaaaaaaaaaagtcctatttatagcatctgccaatttccatgatatacaggttcctaccgtggtcagtttcaaactatcaacctgatctcgataaaagcagagttgagaaaagatgcacgtaattggctcttgagacctgacatgagctggctccagcacaacacagccttcaagtacattttgtttcccatgtgactctagaaccacatcagaattttcttcaaggttgttttaccaacagtcactcaagaacacttgctgacaatccaagacagagacctaaattctcttctagaacttagagccacttctaaaatcaagattaatgctactttaggctctagagtgaaatgtgcatgaagagatgtcacctgacagtgtaaaatttattcccaggtattgcctgccttcagcacgccactcggttccgctcttattctgttgtgcacattcaatccactcattgacaataacaactttcaaagctttccctcaaaattttattacataaaatgtttggcatttataaaaatagtatatgactaggccaggcatggtggctcaggcctgtaatcccagcactttgtgacactgacgtgggtggatgacttgaggtcaggagtttgagatcagcctggctaacatggcaaaatcttgtctctataaaaaatataaaaattagccaggcatggtggcccacgcctgtaatcccagctactcaggaggctgaggcacaagaattgcttgaacccaggaggcggaggttgcaccgagccgaggttgtgccactacactctagcctgggcgacagagtgacactccatctcaaaaaataaaataaaataaaataaaaaatagtatatgactattgtgacccaatttaattcttatcaatccatgaccaatctttccgtatctatacttgacccacttttcacctcctatattaccttgaaacaaatcccaaacatcatttcatctgtaaagatttcactaaaaagcaataatattttaatctggaaaactcatataaactgaggtattttgcaacttttcagtataataaaaaaagaaaaaagtaagctgaggtataatcaactgaggaggagtaaattgtcagctctctctgacttcatggaatttttatttttatttttgagacagagtctcactctgtcacctaggctggaatgcagtggcgtgatttctgctcactccaacctctgcctcctggtttcaagcaactcttatgcctcagtctcccgagtagctgggattacaagcgtgcaccaccacacctagttaatttttttgtatctttagtagataagagactttgacatgttggctaggctagtctcgaactcctggcctcaagcgatctgcctgccttggccaaggcaggaggattgcttgattgagtccaggaattagagaccagcctgggcaacatacggagaccccatctcaaaaaaaaatttaaaaattagctgggtgtggtggtgtatgcctgtggtcccagctacttaggaggctgaggcaggaggatcgcttgggcccaggaagttgaggctgcggtgagccatgaccacaccactgcactccagcctgggcaacagagtgagaccttgtctcaaaataaagaaaaaaaaaggaaaagaaaattggggatcatttgccaacatttagcaattgggagatttttctataaaaatcctatggaggccaacccaacagcttctctccccagctttaagcagggctgattggagactcaaccccctactccctcccaagacacctctggccaatgaggaatggatgttggtgggataaatactccagcttccttgcccctcaggtgggctgctgtgaagcatgtccctgccatctcccaaggcccctacagtgttgagttctgcttgtccacggtgctaactacccatcaatactctgaacaggtttgtctcccttccccgctccccaggggggcttccagaaatgcgtttccaaacaatcttctgaactccatctttctctacttctgggagaattcaacccaagatctggtccaccagctctcagcccaagtcctcccagttaccagctctacccccggcggggcatgttcatccggagtgctgctgtgacccagtcattgtgcaagggcgccgtgctgcaaagatcaaagaagcctctgcattctggaaaatattgggtcaaatagcatgtcattttagaaaagctctcaagtatggcatttcctgagcactgcaattacagcctctttctatgttggctttaaatgcccgtgtaagcagctatttactctctggctcggggcaccactaaagggctcttgctcgctctaaatatatcatgacaaactcataaccctcaggctgcccgaatgtacatttgtgagagtcggccaccgtgcttgtggttgagtgcgtccacatacaaccgtgccctgagtgcagttcaaagctaagcagagcctcttccctactttccccttcgccgctcccctccccaggagaagccatgaggaatttctctgaagagaaaaaagcgacaggactttgagattcactgttagactggctccaagggcaggagcttcctagagtttaacaataggcctggcacttaaaatatgtgccaataaatatttgtcaaattctgaaccacgttggtggcttgctttccctccctcccttcctcctcccttttctttctttttttttctttcccttccttccttctttttctctttcttccttcctgtctttcttcccttctctttgccttccctccttccttcctttctttccctcctttcaaaagtatacacatgtcattgcttgtaatagacaaaaaactggattcaaccttcgtgccgatggacaatagcaggttaagtcctgtacatccacctaatggaatattctgtggccttttcaaagagagctctttatgctctgaggtggaggtgcctcccagacatattgttaagtgaaagaagtcacatgctgaagagcatgtatggtgtgttatcacctgtgaaaaaagaaaaaaatgcttataaatgcatgaaatacctcaggaaagctaaaaaagaaactaacaaaggttgcttctggagaggagaagtggaatgtaggggttcgaggtgagaaagaaacctcactttgtgtattttattgattgtatgtatgtatttttcaaatgcaatatcaataaaaagaaagataaaagagcctgctttccagtctgaatgcactccctggggtgtgcattttcacagtgggttttggaatcctgtgtgcgcccccagcaaagtgcctgcctcagaatacataacagataggtccgtcttgagggaagcaggtggagttctcaccagtggttcccatctaccaaagtcaggctggcaacttgaccttctttaggcagaaacatcacaaattagaagaaagcattctcacaagagcacagtggacacacttcattcactctggacgcatctgctgagcaccgactgtttgccgcacagtgttccaggctctggggtatggcagagcaagacggataataaccctgcccttcctgccttctagcttgccttctagctggaggaggagggggcaatcaacaagttaagtaaatagatggaggccgggcacggtggctcacgcctgtaatcccagcactttgggaggccaaggcaggtggatgtcttgagcccaggagttcaagaccggcctgggcaacatggcaaaaccccatctctacaaaaaatacaaaacatagctgggcgtgatggtgggcacctgtagtcctagccactcaggaggctgaggtgggaggatcacctgagcctgggaggtccaggctgcagtgagccatgatcatgccactgcatgccagcctgggtgacagagtgagaccctgtctcaagtaaataaataaataagtagatggagtatgttaaatctaggtaagggctcaggaggggaaacagcaggaaaagtgaatacgaagtgctgggggtgggggcaaggctgtgacttcaaggtggtcagcggaatcctcacagagaaggtcaaggcctgaggaggggaggcagtggctctggagatatctgggggaggagctggaaggaccagcaagtgtagggacgaagctcctccaccgtttgtagatgggtctgggtgcccaggagctcctgggaactcctctgaggcctggttttgtatgaacttagtttctctgaacttggatcagtcagccccatgctcggaatcaggtggagccaaatgcaaaaagggacccagggctgcatggctcatgccgagaatgatgccctgccggctcaacctccactgcaggctcaggtttggaggaaataggccccagagactaaaacaataatacatgttccaagaatacttcaaaaatattcctcctcacaggctttcccagtgtgggttctccagcccacaaaacgctgtgccgagagaaagtggcttctagggggcctcttggagactgaccgaggctccaacaagtcctgagtaagaaaacctaactcactttgttcagttgggtgtctcccaaacttccctgatggaagaagctttttttttaagttactgctattaatattcttggacacaaatgtccatggactcctctgagtgacattgaattaggaggtttcggtggattcatccctggagaaatcattttatgaatcaaatacagaagtctttgctttctgttattttccctgtaagagtctctttcaagactgttacccaaaaaagaaaaaaggaaaaaccaaaaagaaggtaagccttaaaaataacaagagcgtgctatttccagttcagtggaatgcctgtgtccacttacgaacagcgagtgggcacctcggctgtggacagaccctgtgcccggtaagtgggcaactgtccaactgtgcgaccacattcagcgtaaggatggcctatcccccactgcccctaaaccttccctattgcctaagaatgggggaaggtgaaagagaacttcctagaaatgaagcctggaaattctcttcctaggtatatgtctaccagaaaccagtgcttgtgctgcatagaagcttcctaagacatgtacgagaatacacataggagcactgctcatcatgcccccaaacaggaaacaacccaaatatccatcagcaggaggagatataaattatgtgtgtgtgttcatacaatggaacacaacacaatgagaaaaagtataaactaccgccacacacagcagcatggaggaacctctggaagcttgctgtgggattcctttgtttgaaggtcaaggacaggcaagactgccccatgatgacaaaggtcagaacaatggctagtttagggggcagtgcgagagaccctgctggaagctgaaaatacgcagaaaaccagcaagctgcccgcttataattcatgccctttactctaagttatatgccaataaagaagtcaacaagttgagaagtgaaaacataaaagtacactttgggaggccgaggcagccggatcacgaagtcaagagattgagtccatcctggccaataaggtgaaaccccgtatctactagaaatacaaaaattagctgggcgtggtggtgtgcgcctgtaatcccagctactcaggaggctgaggcaggagaatcgcttgaacccgggaggcagaggttgcagtgagccaagatcacgccactgcactccagcctgacgacagagcgagactctgtctcaaaaaaaaaaaaaaaaaaagataaaagtaaaggctggaaaaggggaagaggtagcccagagctgcctgcttttctcgccctattagggatcccctaaatgccatcgagaggcaaaggtcgttttttctccatcctctgctaccatccccaatccaagccaccatcacctccagcccctgctgggtctccccactacacctgttgcacccatccccccaaccttagtgtctacacggccattagagagatctttccaacacacgaatctggggacgccactcgcgtgatggattcttcaacttcttacctttgtcctcaggctaaaaatctcaatgcctcaatagggtttacaggacctctccagagctgactgcagcctcctctgtcaccacccttcctcttttccacacctcactctcccctatagaatccacttcaggtccctaaataggtcacgtgggatctctctcacctttgcatagatcatttcccctaccaggaacagtactcttcccaacacaccagccaactcctgcagctgcccatcacttctcccagctcacccttcacctctcagctgcaacatctcttcctccgagaagccttccctgcttccacctgggtgctcctctagcaccctcctcagagcatccatggtgctgttgtgcaatcacctgtgcaagtatcttcatctcctgccatatctagccccaagagggcaggggctgcctgtcttgcctaccatcagagccccagccactagcactcggtccaacacgaggatatgcccaacatgcggtcaatggatgggtgtgtagcgctccttggaaggtggctatggcaggtgtggcagactccatctattggggtctgcctctttttacataaaagctttctctgaagcctcagaaggctgccctgcccatgcccagggcacaatggaagggctggggaatcaacctctgtcccccacaaccctcagcccatggctgatgggagttcgtgtataaacacctcagctcactctccttgggggtaattctgagggagggctccactgcttccctgagtttcccttgcagttgagctccacttgaccacagtggtaacctgtgtgggggccacaaccctgggccccctaaaagcttgctgaaaaattttttgctgaaaaatcactgacatgaggcagattaattaataatagaacaggggccaggcgctgtggctcatgcctgtaatcccaacactttgggagggtaaggtggtctgatcactcgaggccaggagtttgagaccagcctggccaacatggcggaaccctgtttctacaaaaaatacaaaaaaattagccaggcgtggtggcgtgtgcctgaaatcccagctactcaggagaggatcacttgaacccgggtggcagaggctgcagtgagctgagatcacaccactgcacttcagcctgggcaacagtgtgagactctgtctcaaaaaagaaaaaaaagaaaaagaaaaaaaagacaaaattattttacagatacacacgagagccttcagaaggagatcccagccccatggtggctcagaggcttatatactatcctgccaaagtgggaggggcaatgagaaatgcttctgaagggatttctagggagaatgaacaagtcttagagggaggggaaggaaaaaacaattgttctcattggtgggtctgggtcttaggcagataaagggacttcagcttctttgagagagacagtgggggcaggggaaaggtcagagagaccttgaagcttcttcatgttgttttaaatgttcaatttccttaaaattttaaacattatttccaacattcagttgagcatgtcaaaatgccatattttggggtattggtttctgagccccaacacctacttcctaagacacctatttcccttcctcgtctcactcctatcaatatctctgagggccacatcacaaataaacaacttgcctttgaatgcttgcctcagggaccacttctggggccctgtatccgatagcagggcttcccttgcccattccctatctggccccaagcttcatgtgggtctcttggcccaggccccttgccgggacaccctctacagcacacacagggcggagatcagatggacacaggccactgaggacttgggaatggaaaggcagtgcctgtcaaactgagaggagcagccaggatgctggggataaaggaaaatatgaggccacagggacgtggtaaagagtcgctgacacagaaattaaagttggaaatgcaacaccttcaacggaggctcgatgtgtgcctggagggggctgggcttctgccctgggttctgtaggttgagtgaagctcactgcccaaacttgcgaaatgcagcagaagcccgtgtacctccctccattccagcctctgaaggcccaggagtcctacaaggtgccagtaaagcatgaagcaatgccctggaaagcactaggcaccctgagagacttgatagagatgtctaagggataagggaccctgggtggaccttcccaggttcccagctggaggatccaagcctccgacagccagggggccacagcctctatttgaagatgggaccaaggtctgaactggcacatctgggatcccaagttaaagatgtcccttggcatcagaggtggatgggtgggaatgtacggctgatggggatgagagatgggcaccaggaataccagcaatggaggctgggagtctgagaagcatgagtccttctaggatgccttccccacacccacaggctatgggatttgggcccaagccctgaatgaggccttaggagaccagagtgggatctgtgctcaccccactggctcagcatccctggttcagtcataggtctgctgacccttcagttgggctttccagacatctatgaaataactacaagtcacattgaattggccggatatttacactgccctggaccccaaaagaaatccctaagtatggggaagaggtgggcagagaaactactgaggagagtagaggggtgcctaaggtcagatatttgaaacatctactttgaggtagctctttgggctgctgttaactggtcttagcttgcaccgatttgcatggctgtattaactccatagataccggtgccctccaatacacatgtgagcagtgggcatgtgaaatgcagctaatctaatccaactgctatgtgctgtgagggtggaacacacactgactgcaagacctggaaggaagaaaagatacagtatcttattaatagttttatattaattgcacattgaaatgatatttcagatagattgggttacatgaaatatattattaaaatttatcgaggaaggaaggaaggaagaaagacaacaacaagctccgtctccctctccctctccctctccccacggtctccctctccctctctctccatggtctccctctgatgccgagcccaagctggactgtactgccgccatctcggctcactgcaacctccttgcctgattctcctgcttcagcctgccgagtgcctgggattgcaggcgcgcgccgccacgcctgactggttttcgtatttttttggtggagacagggtttcgctgtgttggccgggctggtctccagctcctaaccgcgagtgatctgccagcctcggcctcccgaggtgccgggattgcagacagagtctcgttcactcagtgctcaatgttgcccaggctggagtgcagtggcgtgatctcggctcgctacaacctccacctcccagccgcctgccttggcctcccaaagtgccgagattgcagcctctgcccggccgccaccccgtctgggaagtgaggagcgtctctgtcttgccgcccatcgtctgggatgtgaggacccctctgccctgctgcccagtctgggaagtgaggagcgcctcttcccggccgccatcccgtctaggaagtgaggagcgtctctgcctggccgcgaccccgtctgggaggtgaggaccgtctctgcccggccgccccgtctgaaaagtgaggagcccctccgcccggcagccgccccgtctgggaagtgaggagcgtctccgtccggcagccgccccgtgcgggaggtggggggcgcctctgcccagccgccccttctgggaagtgaggagcccctctgcccagccgccaccccgtgtgggaggtgtacccaacagctcattgaggacgggccatgatgacgatggcggttttgttgaatagaaaagggggaaatgtggggaaaagatagagaaatcagattgttgctgtgtctgtgtagaaagaagtagacatgggagactccattttgttctgtactaagaaaaattcttctgccttgggatgctgttaatctataaccttacccccaaccccttgctctctgaaacttgtgctatgtccactcagggttaaatggattaagggcggtgcaagatgtgctttgttaaacagatgctctgaaggcagcatgctggttaagagtcatcaccactccctaatctcaagtacccagggacacaaacactgcggaaggccgcagggtcctctgcctaggaaaaccagagacccttgttcacttgtttatctgctgaccttccctccactattgtcctatgaccctgccaaatccccctctgcgggaaacacccaagaatgatcaataaatactaaaaaaaaacaaaaacaaaaaaaaaccataaaataaaattaacaacataaattaaaaaaaaaaaaaagacaacaacaaaaaaaccttgaatcaggatgaagggatttggggtgatcttttccattctctagtttcaaacttcacgtaacgtgatattacttttaaattttttattaaaattgtttaaaaacaaaatgaaaaaaaaataaataaataaaaataaaatttatctcattgttttatgtgttgaattgtggtccccaaaaagatatgttggagtgctaaccgctagtacctcagaatgctaccttatttgaaaatagggttgttgcagatgtaattcgttgagataaggttgatatggtttggtctgtgttcctgcccagatatcatgtctaattggaatccctgatgttggaggttgggcctggtgggaggtgactggatcatgggggtggtttcttatgaatggtttagcatcattcctttgctgctgttcttgtgatagtgagtgaatgagttatcatgagatctggttgtttaaaagtgtgtagcacctctccccttcttctcttccctctggctacataagatgtgcctgcttccccttcactttctgctataattgtaagtttcctgaggcctccccagaagcagaagccaccatgcttcctgtacagcttgcagaactgtgagccaatgagacatcttgtctttataaattacccagtctcaggtatttctttatagcagtgtgaagatggactcatacaaaggtcatactggaatagggtgggccctcaatgcaatatgattggtgttcttataaaaaaaagaagatacagacacagcaaaaacatagccatgtggcgatggagacagagattggagtgatgcagctgccagtcaaggaatcccacgattgccagcaagcaccgtgtgcggggagaggcaggaaaggcttctcccctacaggcatcacacaggccacggctctgcaggagccccgattttgtccttctggtctccagagctgcgagaccataaatgtctgtggtcttaggccacccactttgtggcatatcgtgacagcagccctaggaaaggaacataccctgtttcattttacttatttaacgtggctaccagaaccttgtgaagtacgcacaccatgatttcctctttccagaggaggaagccgagactcagagaggccaaatggtgcgtgtaaagatgacaaagaccccaggagacagatacaaattcagacatcccccttcagacctcagtgttctttctggaactgcatccaacctattggtttcacttttatgtaacaaagttgtgaggtgttttcagtagccacggaccctcaggtcacgtaacatgagcatgcccagatgacttcagtgtgcaacctgggagaggggggatcctaagtgctgggatggaggatccaatcagatcaagctctggcatcaccccgtggcaggatccagtcatatcacgcctcctggcatcacctctttgcaggatccaatcagatctcacctcattaccttatgcttataaaaccttacccagcccccaactcggggagatgctgctttgggaattatccctggtgttcgccttacttcttacaagtaataacatccccttgctaagtcctccttggttgtagtcactgggttgatatctgccaagcaactgaacctgctggttgtgtggatgacatttccattgctcatttgttcgtttaacatgatttattgagcacctacagtttgccaggcactgctctcagcatttcagttagatagataaaccaaacacagatccctgccttgtggagcttatggtacagcagggaaagacagacattaaataataaacataatgaataagtactttttttggtacgttagaaaggctccatgctataagaaaataagtagaacagggtaagggggattggaagtgaagggtggtcagtttgcagtattacataggggggtcagggtcagccccatgaggaggtgaagctcagcaaagatgtgaaggagctgagggagtgacccctgctgaaatctggggggaaagtgtcccaggcatagggaaccgtcagtgctaaatgacagcatgaatatctaagacatatccaagggaaaacaaagcagcttttcaggtgggtttttgtcacttgttggaattgctgcatctaagtgctttcttcatgtctcttcatgagacttgaccaaaggcctttcccagagaagggccctagaagggtcatgtgggttgtcttgcatgggcagatgtctcagcaacagtggaaacctctcatctgtggcagagattctgggggctgcaccaagccaggcttccctggtgggtcaccagcctagtgcatgaggaggtcaggaccagccccactgaatggcgttaaacacgctgcagctcttgaatctggagatggactgagcagggtgggagccagggagagaggggaccatttttcttacctaaataacctggaagtataatgataattgtgttattatcagtgattagggtgacaataagagaagataatttgtttaaggcagtcccaaccccaagtgtgtcaagtatgtacgatatggggagtatttttaaaagatatctgaacaagaaaagtctgagatcaagttaaatgttccttctctcacagaacaggatgtaaatctgatagtccctgggctttagagaaaatgatactgctggatattaaattgtacagcgtcactatttattatttattccagtaagaatgctatcacccttaccagacacctacgttttatactcacaaacttccctgaccagggccaagaacagaaactcaacagttagagactctgccaagtgcaggggacagggcagtattactcggtggtcctcacaggcataggcaatgtagtggggcattggcaagatgaacaaattatgactcctggactcaataaataagatgatctccaattgtcctggccagagtgggcaagaccaagaggtggtttcatttctaagcagtcagagaaggtaaaaatagcctctcctctcacttctgcaccacacctgcattctgtttgctagtcatccctgtcctttatctggtccagcattgctagacaagttggtggctctggagacgacaagtttgagccattctcatggctggatgaaacgaggtatgggatgggagtctagagtcagtgtcctcaacttctcaccccatccctagggttccccacatgagtctagtttaatgcaatcctcattttgcacatggggagatagagacccaaagggagccagaacctgcccatgtcatgcttaggtcaaggcaacccgacctccatgctcgtgtccttccattgcctcacactccctcactcaccgagctctgtctccttaggatggaaaacaactttcaggaaaataaaactcatccaggcctcaaaacttgagagaggctggagaacagcctgctttattcacaagtgactagaccaagggacttcaaactacatttcaaggaatcccctgaatgccttatagaggtttctggagctgtgacatggggctgtgtttccccacccaacctccactcctcctggcctcaccagatctcagtcctcatctgttttgtgttttgaggttccacactggatatcattgcttttccatatctgaaaagcaagtttgggataaatgcattgttcagaatgcatggaatactactcagcaacaacacggatgaatccaaaatgggtaatgctaaatgaaagatgccaggcccgaaaggctacatactatatgattccatcgacacaacattctagcaaagacaaaactgtggggacagaaagcagctcagcagttgccaggatctgggaactaagggttgaccacaaagggttgcagtgttctgtgttaacagggatgtttcctatcctgatagtggcagtggttacgtgactgtcagcatttgtcaaaactcacagaactatgcaattaccgtatgtaaattacacctcagtaaaactcgactttaacaaaaaagcttggcgatcacttcctgaacatttttttattctaagatctttatgaacagttaaaaaaggaagcaaaagctatcagcctttgggtgtgtagggtgggaaggagatggccaccctctggggcctcctgcatgtcagacaaccagctcgtcactttagctcatcttttaaaattcacactttcacacatacgtataatcctcacaataattctatggagaagctgaaaactgacaggctcagtgtggcagataatattttccagaacagcaagagataatatgaaaaataaataaaataacacaatgcagtgttttaagccaccaggttttggggatgatttgctgcacagcaatagataattggaacaccaggtaacccgcccgaggcatcttcgcagccagataaatgcggttctctatcccaggtctgccccttcgctctgctctgccccttctctctgctttgccctgttcctgaatcaggcagtgcaatacaagccccacacacagctacagaaagaaactctaaatgcatccctctgcagagcagtgggacccagccccactctgggagccaggtttcaaggtagtgcctggcatacaataggtgctcaataaatctttgggaaataaaggaagcgattccaggccgtcctaggagctgacaggacaatgaagccgacacagttccttgttcacggtggggttggcggcgggtagggaggagattgccctttagggaagagacggcaataagcaagcaattcagatgactttagacactaagtgccgtgaatgaacagggctctgtgatggggagtgactggatgtatagggaggccaaggaagtcctctttaggagatgatatgggaatgtgtgaatgagacctgaaagacagaaagatgccagctttggacagacgagaaagtgtcctcctgacagaggggtggtcaaatgaaaagctaaaagaggtacaaacacacacgtgcacatgttcatattctagagccgagcaaataaaacaaacaatatgagaacatggaataaagtgtagggcatcagttaggagctcaactttgccaccagctccccaagtgaccttggagtggctattttctctccctgggcttctgtgtttcctgctgtaggatgcagaggttgggtggaatcgatgacaagctggactggcacaccccagcctgtgacagcagactgtgcgcgtctcctcccagctccatattcggtgatgtcaccttggtaggtggaaactggccataatggaagcagttataccatgggaagtggcaaatgccaccaatccaaattttttttttttttgagagttagttgctaaatatttaccagcataccactggactagatgagtgcttctcaaacgcttttgctaatgtttcctggtggcagaggacagctgatacataaccccagaggcctggggtctcagcattttagaatcttccttagactctcctactgtaggctaggggcagtgactcacgcctgtaatcccagtcgaggcaggcagatcacttgagatcagaagttcaagaccagcctagccaatatggtgaaatcccatctctactaaaaatacaaaaattaaccagatgtggtggcacacgcttgtaatctcagctactcaggaggctgaggcacgagaatcccctgaacccgggaggcagaggttgcagtaagccaggattggattactgtactttagcctgggcgacagagtaagactctgtctcaaaaaaaaaaaaaaaaaagaaaagaaaaaaagaatctcctattgtagtttttaaagtttttaaatctacagttaatttatccttctacaccttaatgtgcctgcatgtcttgcttccttatacactcaaaatataaaattttactttcataacttctgaaagatgtatcttattggtcctgtgggttttttacatcatgctacacacacacacacacacacacacacgcgcgcgcgcacaagcacagcccttcttgaatcagtgtgaccctgtgtcaaggctggcactagtcctccaggtggaaggcctcctcctctcccatccctcttcttccctttccccttatcctttcaaatccatggcccaccctgacttggaattgaaatgggcattgggtgaggagaaaaccagaacttgcagctgattcgtgaggccctgggacccagaacagaggttctcagggtctgctcttgacagtgggcccaggcctggtcagagatacttcccaccctctcgtgacagagcagctgctggctcctcgcaggtgtctccaccggccctgccagcacccacaggcgatttccctgcagacagaaaggaatgagtttccttttccttctccttgtctgaaagcaagtgggcttagatcatcacactggggcttagttagggagatccgttttctgcatcccagactcgaggctaccacagacttcctggctgaccttggacaaacagttttgttttttctatgcctctttttccaccatcagctgctgcaaacttcactgctggggatggctgagtggatgtctgagacggcctcgaaaaggggccaagaatatttccaaacacagagctgggcccgtggcccatggttccatagcaccaacagaaaggcagagacccagcctctccaggatgccagactctggggtgctagaacactcatcgtggaaaattccggaaaaaaagtgcaaagcaacagcatcccccaaaggagacttgagaggtctgtggagggtaggaggcagtgtgtgatgggaactgatatggggacatgggggaagggacaatctgatactgaagggaccctctcctccccttctcctctaaggttctcaaaacacctcctgggtctgcactggcacctcggccctctggggctgcccatcccccaagcactccaacaaatttccactgagggcctcttcaccactcaattcaatggccattttccagaactgatctcactgtctgctccatcctgtatgaaacaacccctcactctcttcacttaaaaccctctactttcatggtgtatttgtatttgtattgtattctcctaaagcagagacctgagacaaagccctacatgcaaccagtgtatgtagcgggtggtcctgggaagatgccaggaaagcgagcccaggaaaaagtgtgtgttactgggctgggcactgctgtgggcacccggggctggaagcctgctgggaccttccaaggggctgtatagaatgcaccttagaactgtccctccaaaggctgcagggcaggagcattggtctggaccccatgggttaaatgtcacttcccagggatattaactcctgaggcagaaaaacagagagccacaggggtgcttaaggtggaagacatccgtgtgcgcaggaacggtccatactacagctgcggccagtgtggccctgaggatgagaccagcctgtcttctggacatggcctccatgacagccagctcctgggcttctcctcctgctcctggggccacactctccacctgcttccagggcctcttccctccaccccaccccaccccaccgaggctcccttaacctgcgatgcttctcactgacacctgcttgcctccctccacacccaatgtccttggcttctctccatcactgcacagaacacattggattcacatttcgttatgttttttctcctctaggaaacttcttgtgggcaggaacaagtattgttctgtgggcctgtagcctaacaccgtgtctgacacatagcaggagctcagaaagctcaggaagagggaagaagctcctctctcttccccgtaaaatgcccatcagtggtggcattaggaatccattttcattgcccttaagagcccacatgaaggctgcctactggtttctactctcccctgatttctgaagaatgcaggaccctgggatggtgcaagatgccactttttctctcaggaattccaacccagcaggtgatctccatctggctgggacattcattgccctctgaaagtcccccattccagaactccaccacattgccccctccccacccctcacattttcataaggcttggcaaatgtgcaattctgtgtgccttcccagcaagttagggctagttagaaccctgtaccccataaagcagttcttccccatcccccctcttccagccccctggaacccaccaatctgccttctgtctttatggattttacctattctgttttttttttttttttttttttttggtaaataaagttgtatgatagtgactgacttctttcactgagcatagtgttttcaaggttcatccatgttagcaagtatcagcacttcatttctttttcatgactgaataacattctagatataccacaattagtttatccaatcatccactgagggacatttgggctatttctaccatttagctattgtgaatagtcctgctataagcacacatgtgggtgtatttgtttgagcaccagttttcaactcttttgagtatacaggcaagggtggaatcactgggtcatatgataattttatgtttaaatttttgaggaaccatcaaaccattttccactaaggctgaaccatgaggctgggttccaaccagccctaacctatactccccccagcgatatacaaagggtccaatttctccacacccttgctaacacttgttattttccattttttttaaacatcattttagtgggtgtgaagtgctaacttactgtggttttgatttggatttccctaataatgaataatcttgagcatcttttcatgtgcttgctggccatttgtatatcttctctggagaaatgtctatttgattagtttacccaagtccttttcgaaatcaggctgtttgtccttttgttattgagttgtaagagttcttcacatattctgggccgggcatggtggctcatgcctgtaatcccagcattttgggaggccgaggcaggtggatcatgaggtcaggagatcgacctggctaacatggtgaaacctcgtctctactaaaaatacaaaaaaaaaaaattagctgggcgtggtggcaggcgcctgtagtcccagctactcgggaggctgaggcaggagaatggcgtgaagctgggaggcggaggttgctgtgagccaagatcatgccactgcactccagcctgggcaacacagtgagagagactctgtctcaaaggaaaaaagaaaaaaaaaaagaattctttacatattctgaataccagactcatcaaaaatatgacttgcaaatactctctctcatgttgtaagctgtcttttcaatttctagagaatgtcctttgatgcgcaaaagtgtttaattttgaagcccaatttatccagcttttcttttgtcacacgtgctttagtgtcatatctaagaatttattgctaaatctaaggtcaaagatttcccatgttttcttctaagagtcttatggttggtttattttgagtaaatttttttgcacatgatgtgaggtaggggtgcagctttattcttttgcatgtagatatacaactgtctgaatgttctctttaacttcccacatcaaccccaggagagaagcagtgttatcaactccattttacagatggggaaactgaggttttccaaggtaaaaaagctgcccaaagccgcagagatagcacatggtaccactgagatttggtcttgggcctgagtaagaaccagcatatctgaccattgtgactgatgctctgtcacctggccctggccctttcgccccctgatttcagcctggctgtggggggtcagtgcgtgtgcacggcccacatcccttctcagctgtgctgcagcatctctctgctctcccattgtggggtttttcctgaagccttgagaggcagcaaagtccacacaaaggcacaattctgggaggtgacacccttctagtgggagaattctacatgcttcctctgtggatggagctgccatgcccacctcatgaagcctctcaatgaagcatcctccccctctcagtctccccacaccgcacccttgcctgctgggatccccacccagataaaccacctgcatctaagttcttgctcagctctgcttttgaggaatccaactaaggtacccacccaaatttgcaggaaaggcctccgacccttgccaactccccttccatcagagcactccaagcctcagcctggccactaaacaggaggcttctgtttcccagcccaggccacagctcctgctgatcccatatctgagctggaggccagaaggagtaattttaccacagctctgagctcctctacaagaaaggatgcaaatcctatttgggctgatgttgccaaaacccaaacaagaattctacctcaaggcacttcttttttcaagaccacatgcacagctgggcttccccacgaaatcatagctctcagcactcaagatttgtccacccggcaccctccctggaaaggcctcctggcaaaaaggaagacagtaggaaggaactgggagaagacaagcgcccagggacccgcataatttttgttctagagtttcattgcctcacagtttttccagatataaatgaccttttctaatagaggggcttggaccaagagactactctgagctctgcctccagaaatcaggatagtcccacagcagccttctgatagcctggagatgtcagtggtcacccaccatgctcccctctctgccactggcacagggcacaggggcttcccttctagtgggcatgatagcaaattcctgacgttatctcccaggccttaacccccaactcttagaagtgtgcttagcctgcaaggggtcaggggacagtgtgattgtaggttatgaaccagagagccacattcaggttcacgatttggggttatccagatagttactggacccatcctaagcactcagggtcaggctgacatcctgcattcccaaatgggaaggcaggacatgaggatgccgacctctcagaagctgcaacttcctcaatttttttttttttttttagatggagtctcactctgtcacccaagctggagtgcaatggtgcaatctcagctcactgcaacctccgcctcctgggttcaagtgattctcctgcctcagcctcttgagtagctggtattacaggcacacgacaccatgcctgcctaattttttgtatttttagtagagaaggggtttcaccatgttggtcgggctagtctcaaactcctgacctcttaatctgcccgcctggacctcccaaagtgctgggattacagtcatgagccaccgcgcccagcccaacttcctcaacttttaatggcttctcttaaaagcctgtcttgggtgttgttctcctcccacaccttttctccctccgcacagatggcaacacacacagagctgcagtcccttgtccacacaccaaaaccccagggagacacatctctgcattctcatggcccacctgactccacgtggaacatgttgtcagggctcgatggatgtctgtggaatggattgggtgcgggccacacacacaggccactcaccacagatacagcagctctcaatcttggctgcacatgagaatcacttgagaagctcaaaaaagcattgaagccgggtcctaccagagatcctgatttgattggtctgggttgggacccaggtaatgagatttttaaaagaattacccagatgattccagggtgtgtacaacaggagttctcaaacttgagccgcatcaggatcccttgggcccggcggggggtgggggaggggctttttaaaacacaaattgctgctcctgcaacctctgcccagagtatctgattcagtagatcagcagtgggactccagaatccatgctttgggtttgtgtgtgtgtgtgtttttaagagacaatgtcccactctgttgcccaggctagattgcagtggcacggtgacagctcactgtagcctccagctcctgggctaagtgattctcccacctcagcttctggagtaggtggaactacaggtacgcaccaccatgcctggctaacagaatctgcacttctaacaagtgatgcaggagagttttggaaaacaggggcaatctgttctttggggagagagctgggagtagaaatgcagagtatggagggatttgggaaatgccagggcagggtgtgcctcgggtgaagcatgaagggcatgggcaagggggaaggacatgggaaaggaggtgggcagggtaggaaacggcagaccctgtgggatttgggaacccaggaggtgaggcaggcagctgagctgaggtctctgctctgctctccgaaagcattccttccgggatcctgagaacacgagtcgtacaggcccactaccttcacctgtcccctggacaatgacttagcctcccctctggcctccctgccccctctcaggccccaccacgtccattctcccctctgcaaccagagtgaccattcaatatggtcaatccagccatgtcatgtcatccctctgcttaaatcctcctaggagtttcccagcctaccagtgatgaagttcaaattctatgtcctgtttaccccaccattctgcaggagccatgaggcttccaaattcagggagtgtaaggacaccacatatgcacagaggctgtgccacaggctgcacctgccagtgaccgaacatggtggagatactgaggcaggctcacttctgagagacacggggcttcccgaaagccctgctgagtcttccttagactgcacacttctgtgtctgggacatttccacccaacctcccctccctcagagtcagccttacctaaaccctcagaaatttcatccaggcttctccgtaattaagggaggagctggactcgtagcctgcaatcctaggtaaggggcacagaggaagcaccagccactgaagttatactttcctgcacatggggtcccccactgtctcagggcagcttcctaagactccatgcagatgtttatgaaggaagcaccctcaagggaaaccagtttgggcaggagagaagcaggacaaggaaagggaaggggttaaagaggcatctgtttcagctgcggtctgcatgggaccggctcctctgtggtgccctggagatctcacgtgtatccaaataggccacggaggcgaaggcttgacccacagccaatctgaatgtggtgggtgaaataacgccccgcacccctacatctgtgtcttaatccatggaatctgtgaatatgttaccttatatgcaaaaaggatgttgagtaaattaaagatgttgagatggggagattttcctggatttcccagatgggcccaatgtaatcacaaggggcagtgagagggagatgtgaggacagaagcaaaggttggagggatgtgcttgctggggccactagccaaggaatgcaggtgccctctagaaactggaaaaggcaagaaaaaggattctcccctagagcctccagaaggaaccagccttgctgacaccctgattttagcccagggaagcccattttggacttctgacctccagtactgtaagataactttgtgtgaagccactaatctgtgatggtttgttggagcagcaacaggaattgaacacgctgagtgctggcggaatgcttcgtggtcctcctggatcagaagtgggtgagaggcagaggctgcagagttccaggccatctccccatcgcctcccagcccctagagagccgccgtgggtctgtttgtcatcccttctgggttctgctgagtgatggggctccccatcctgcctctgctcagcctcagtctagaattggcatctcagccaaggggcatcccccagctcacatgacagtcactcggcctctcttgtttgggtgccctcctttctgatatgccgaatgaggacctggggcactggtacctttggcttactcttcattgtctgtgtaagtaataaacagtctgaatctattataaaagcccctgaatcagggcttggagttgccctgaattgtatgcacctgagcttgacaaagtcccagtgcctaatcctgcagggaaccctggagtgggggtgacagcaaaggagctgggcctttgtccacatgaccaccagttgtggccatgggctgcccgggagccccagtgcccaagggcaggtccctgaaggtatcaggggtgagccattcacagcaaagcacacagaccttggaaaaggacctcagtgggcctggaagtgggagaagagatgagggtgtacagttcattacattcaccaataattcatataagacgctgcaggattcattgctgaggcactggattttgaccccacagagagaaaatggatatggtagcccagcatacatagctgtagggacatttcctagaccccagcttctagggcagccatcaagggtgcaatttaacattcctgccaatgtccaggcaggcagcagtggttgtccacagaccaggaaaaggcaattgttttcttcatgaaaaaaggccccaagccagcacttttcatgccaaactactggcggaagccagcgggcagccagccatgccagggttcttggagcacagaaccaaacaaggtggctcagcccccaactggatgccaggataggttggctggaggaggtctgtaagtaccaccgtggccattcagtgacagcacaaaaggatgccttggtcctctcctctgggtgccctttgaccttttctttgagaaccccggctccccacccatctgcctccccctacctctatctctgccacaatgtcttcattccttgtattttcctattggcttttctcctgctcttctcctgacttagggatgcagaaggcccacaggcacttggagcattgctcagccacacaggcccctcagagacaaagaggaatttccctcatgacctggaggacaagatggagggaaggagggaaatttaatcacaaggtggcaaaactttttctattaaggacctgaaagaaaatattttagactttacaggccatgtggtctctattacaacaacccaattccaccattgtagcatgaaagcagccatagacaatgcataaatgaatgggcctttgaatggcagtgttctaataaaactttatttacacaaacaggcagagggccagctttgacctttgggtgtagtttgcagacccctggtttacatgttcccagaatccaacaagttagaattaaaggaactttagagatcatccaggccagggagggcagacaggtttcaaacccatctgccaactctgagtgctcagtgatgattccctgatttgctgtgttgaggattctgaggccaacatctagcttggagggaaagtgccataatagtaccctatgccgtgggcagggagagaggagtggcagcacaagtgccccagattagctgcttgattaaccaaacactttcatttcacatacaaacagctggatcccagagaggttaagcgatttgcccaaggccacagaactggccagagagttgcttgtcaaccggcttcttcatgttactctgcagcaaaatggaaagctgcatttattccattgcctcatcaccacacatctaagccaaataattttcatggtccctggagagcaaagggtcagaagccagggccccagccagtcctcgatttgtgagaattgatgttttgggggctttcacaactataaaaaaaagtcgcatttgtgatgtctgaaaaattaggagactggcttcagagagtactgcctgacagatcctggtcatggtcgggcatgaagtagccccagcattaagctgtagcttccctttttcagcaagaaatgctttgcaagcaccatggtcactatctcatgagccccataaggctaatgccaatcaagcatcaagctctggtatttctcacccatgtgtctatttcctaagattctcaacagctgtgactatcagataataactgccatggtctttattaatcttgattaataagcaactgtagtaacaactctgaaaacaggatgcaggttgaggttttggaagaaacttttaaaaccctggactctgtaaactaggtcatttttaaaaatcagactttctactgttagagtatgtctggtagcagagctttgaaattgcttgggcgtcagttacttggctcttaaatggagtaatgcttacctcatgggctgttgcaacattcagttaaataacagatgacagccaaagcccacatgcccaggtccactctggaggtcacttacagctgctgttggcagtccaggccatgccaagggctctttccagcacctgcatctatctcttcgggtgttctctatgcccctgccccagtacctcccaccccagagtgttcagctcacactcaacacaggctagagaaaccagggcaagactgctcctaggggcagcctccaagcaaggaggactgctaggaggtagtgaaaaggactcttgtgtccttgcctttctgtgtacagttttgagggatagtttggtttgataaaactttatacagtgtcttagaaggcccacagggatacctgagccctatttccttctctcactaatacacccccttcttgattttctttccttccctgcctcacttcttccctcccagtgcatcctggggtcatctctcaaataaatggcctaagctcaagtctttgtgtcaggggcatcctgagatacatttaattgtaatttttattttttagagatggggcctcactatgttgccctgtctggtcttgaactcctagcctccagtaatcttcttgcgtcagcctctcaagttgctgggatcacaggcatgtaccactgcatctaaatcagagatacatttggatttaggaaagggagtggctggaaaggaagcaagaacatgcatgtgtcccccatcccaacaccatggaagaggatgagagggttaaagctgccggcagctacggagcatccgataatgcaatacaagaactatccctgtcaatgagcaggaagctgacagggctaatagcagccaagcaactttctttccaggctgcttttctattcctcttctgctggttcctctggggaggtcccattcatgacacagttctggtgggtttgaaaatcacgacacccaactccaccacatcaaacactctgaggttgatatgggagagaccgtaaatgaagcttgtacacctgggttattcactggcagggtggggctgcaaatgcctggcattttgtctgccacgtgaacagagcttgcatgcagaatgaaggtaaatagaggtaagatgagatgagagagagagcccatatcatcagagccactgaatccagctatgactttggaatctggtggttactagagtcaacacaaacacattccctttatgtttatttgagttgcatttctgtcacttgcaaccaaaagggtcctgaccaaaaaaagacatttcagttgtgcctccctggaattatttcttttcctgaaaaagccacgctgttcggcataactgctttcctcctgcaccacaagggataagaatttaatcaattacttaacatggagagattgaagttttacccatccaggtttccattcagggacccatccatctgtttcttatttaaaggtcttatcaagcgtgtgttttaatttgtgttccctcaaaacaaaccctggtgcaaggattcagttatgagagtagtgagctgctcaggcagactctgcctgggaccttctcatccactcatcctgtagagctgttccagatgaaatttacttaactacaaagaacaggacgcccaagtaacactggctgaaaaaaaatgaaaacacaattctttcataaaataagaaggctgtgggaggagattttgcagtagcagcccaatgacaagggaaaggaccctgggtttttctgttatttctccactgccaacctcagtgtgttggtttgtcagcctcttgcttatcaccttctggtcacaagatggctgctgcagcccccaacatcacaaccacatacaaggtcaggaagcatagtggggcaggggcattacagcagacattattggagctcatcgcctatccctccattttattatttcagtaggctccagtcaattccaaactgccttaacctgagggcttttccctaaaacctcagaaaactgctctgcccatggacatcaggtcagaagtgccccccaaaattcatattcctccagagaaagtcctaaccaatgattgagggggagtagctataaaagtaccttagttccctcattgctccaagggataaccacaaggcatgtgacttacaccttttccaaaaatgtccctgcatgattaagcttagttctccacagtaaaacctgctctataatgcacgctttgttaaatatttttccttccctgtctcacttccctactcccttgctagtgttttcctgggattatgttcccagaaaactacttaccctataattcttgtttcagggaatgcttcggtgagggtttgggggtggggacaaagtaagacagctcttctttttatcaaggagggaaaatcttgccagaaattccccagtagacttcctcttgaccatacctgagttacctgccccacccctgcctccagctgccctggaggagttgaaacagtgagcatctgcaaagtgcagcagggcagttacatctttggaagttgagctcactgcccactcccccacccccaaatcagggtttagtcagcaaagtgagtgaaatgggcaatgactgttgagtgggcaacttatggaatgccaggttctgttcaatcattttaaatcagtgactgagataataaggtaaaggtcattcttggcaagtatgcagtagacaggaaaccgtggagagtaagtagcaagtgtgctgagcaacagaatgaggagcctcaataaactctgcagagcagtggactgaaggatcctgctgcaggccggtgggagttagtgtaacagcctggagctagggcccaaaaggaaaacaaaaacaacaacacaagcataagatggacaagcgaaggcttatcaagaacacactgatgggctgggcgcagtggctagcgcctgtaatcccagcacttcagaaagccaaggcaggcagattgcttgaggtcaagagtctgagaccagcctggccaacatggtgaaaccccatctctactgaaaatacaaaaattagccaagcatggtggcaggcacctgtaatcccaactactcatgacccaagatggcgccactgcactccaacttgggcaaaagagcaaaactccttctcaaaacaaaacaaaacaacaacaacaaaaaacactgacaaagacatatggggtagcttcaagtgtcagcaatgtggtgtgcctgctgacttccagcagcatcacaggtgatgtgtactaaatatctgtgcccctccaaattcatatgttgattcctaatctccaatgcaatgatacttggacgtaaggcctttgggaggtcatttgggttagattaggtcataccattataaaaagaggaggagacaagagatctctctctccaccatgtgaggacacagcaagaaggtggtccctctgtaaactaagggagccctcaaccaagttgactggcagcttgatcttggacttcccatcctccagaaccatgaaaaataaatgtctgtggtttaagccacccagtccatggcacagagtcccaaatgaactaagacaataggttaatcccatgaaggctagtgtgaaggtggaggaaggtgaaagttcccttgtccttatcctggattgatcatggctggggcccatccaactgtggatgtcacttgaaacaagcagtagccaaatgaagtgggctcagaagaaagtagctgggatggaggcagatctggaagccacaagataagagaagaggcatttgatgcagggctgaggaaatgtgacatgataaagataaaactggaagagaacagtatagccatgctcaaatatttgctgttatctggaagatacataaatctttatacaactctagaaattccctaatagtatgtcaatcagtgtccagttagggaaataggaacctcttagatatctcaaatagaaggaattgaatgtagggaactgtttacaaaagtattgagagagttggaaaggtaaggatacccaaagattagtaactgtaggaagtcacagtcaaccttggcactagaagagcaacaggaaaaatagaatacccagagccatcagtcactagactgctggagctgccagagcaggaacccagggacttgtattcattgctgcttctgctggagggtcagtctgatacagagagaacaagattagcttccccttcttctgccttccagtatctctccagtgcctcccattgactaagcctaagcagaagccagcgggcaagataacctgggaaatgcagggttccagcccctttggcagagagcagagcactgaggacaggaatggagccaaaagccaatgagtgagtggttcatggtacagggtggcaggtgtagagagagtatgtggatgaatgtaaggaaggcctatcaaaccaccagactggacaaagacgagagagaggaaacagttcccctcttctgagccatttcagcagaagtgtaacagggaagttccaacgtatgataggtcactagacaagatattttataaggttcatttaacgcctgagagccttagatgccaattatgtactgtccacattcacatttctgcaactgtctttcgttgcatggttttatgcatttcacaggggtgttgattatgtggtccccattcgatatgaatctccctgggaactgggctcacagctaacttctcatcctcttgcctcccaaccactttgtgcagccttcgttaatgttatcaccaggctggtgggcttctctgcgtgggaaattatttacagttccactctgctcttgaaacgtgcctagagttttaaaggaaagggcccttccagaaaatggacagacaccgaaaataaactacccagaaaaataaaacctctttccccagcacaaaggaaatttaagagctcattagccttaggaataaatggtattttctaatgtgtgaaaccactagcaggcagaatatgaatattcataagcatgctcctggaatgaaggtatttgaaaccttcctttaggtactgcccatttgggggaaaggtatgttaactattcgtagtctgattgattcaaaatgctcttaaaatgggatttctggcatttttgttggaacttgtgttctgacacaaaattcctggtgaaagcaatgggaaaaactggccaaactaccaactacagatcaaaagcctgggattaaggagatatccaggcagttttatgaactctactatccccactcacatttaataactctttccaccttggcttccacgttgttctattccctgaccacaggagctacctcgatgcagaaagtcccatgggaccaaaccagcaaggggacggggtggagcagagcatactgaatgtctgattaagaacctcctgggtctcatggactaagccttgagttctttcccttcctgggtctgggtcttttttgcggggggcaggggagatggtggtattggagtaagccaatggatctaaaccttgactgcacattggaatcacctttggagctttgaaatatcataataaccaggccacactccagatcgtcaatcaccgcagtctctggggatgcacctggcctttgttttatcactcaggtgaaatcactcaggggatttcaatgttcagccaatgtagatgtggtagccagtctctaagatgttgccatcagttcccacccttcccaacaggcatgctattcccccataaagaaagggagtgtgttttctaccttcttgaatctgggcagaagtgacacgtgccagttctagtctagcttataggagaaatgacagtttctgttcttttccttttgaaagatttgctcttggaacattcctgctcagaccccagctgttatgcaatgaggccaaagccatgtgcagagaccacatgaagaggggttgagtgtatagctcagctactctcccagcatcaactgctgaccatgttgggagaccctccctggaggtccagcccagttgagccttcagatgactgcaacccccattgacatccgacagtaaatatatgagagactctaagtgaaaactgccctactgagcccagtcaaccagaaagatgacaaattattgttttaagccagtaggctttggggttagtgtctattatacagcatagtcaactggagcggttggaaaccactggatcaagactaaccatccacaagtaaacattctcctaaggtacttactgtccataaggaattaggataccatctgcctcaacagggccaactccatccacatacttagtcttgccccactcctaccctccagctatgctctgtgagagcacaacagcctgcttggtgtggacagcagtgggtcaaagggcgcttctagtccaaacgggtatttattattaattttttaatatcatgttaaaattcatagagttcttggtcctatttggttattttgataacactggaaggaaagatgatcaatagtacattttgccgaaaaggaacctgaagcctcagagagattatatgactttgccttgttgatgtagccagtaatagagaaataggaaaataagtccatgggtcttgagtttaatacagggttctttctgctaaattctgtccctctgagggaacacacacacacacacacacacacacacacacacacacacacacttagagggtgcagtagaaactgctggttgccccttaatatttattttccctttgtggcttgaaaacagaatgttgactttactcagggaagcaatgtatctagctaaaaccaaatttcccaatctctcttgcagctagtgtggtcatgtgactagtgagatgtaagccttaatgttttatggagtttccaggaagcctgctttagagaaacctgtctcaattgagaaaaatatcccttttgccttacctccttcttctagcctatatctcatcgaatggctggagctctagcagctatattggaccatgaggtgagtctgagggtagaagctgcaagctgcagacaacggagcagaaagacataacaagcttgggttctgccctggattgcctatctccaaacttcctaacaaattagagaataaatacttggggatttaagccactatttttcaggtctctattttagccaactacaattttaaattcataaagtgtacataattgattattctgaaattcccatggaaattctatttgatggtacaactaacccttaggacaccagaaacctattttccatgacacagctttaaacttaggccttgattccagctgccatgcctacctcacaggaggaaatggtccatctggcacgtagtggatgtgcatccaatatttattggagggaaaaagactttcattgtacctaattctgataaccacatctctgttccctggcatcgttttaaagacttgagaaacacatcacaactgtgacctcggttggcctagggataagaggaaacccagacagatattccagccagcagccccagccctcagcccctagtgaccttatctcctctttcctctggtggccttgatttacctctgccctggatgtgatgcaagatgagattttaaagatgcttgtgtgatcttccctcccatgattttccaccagatagttactgccctttggcttaggctccagaatgaggtcatgtggaacatcctgaacccaatcagaagtctggcccagacaagcccattcaagatcagccaacggcagccagccttcagtctcatggatgtgaaataaaatctttgttgatgtaaaccactgagactgtgggcttattggttatgcagcattattacagaagtaactgacagaacaccatccactgagagaaccacactagaaactggatgtcatcctttcctcatcatgactttccctcatgcctcacttccaacccccaaatcctaaatatccctcaaagccgctccctcctctccagcccgagtttaggcctgcctcatctctctggattagaatggccttcctgactttagattggtaccccccagttctactttccccactgtagccaggatgagttttctaaagtataaatctgctcctgagcctcccttacttaagaccatgttgtgggtttcagtgaggggagtgtccatgggtcttaagaaggggcatgtccacggcttccatgggcagatgccactgtctaccctgaacatgacttagttccagcattccctgcactgagttgatcaccttttcccccttacataacacacagccaggatgggctcttgctgggtgctacctgaccaagtgccctgttcttacccctaggctgccccttagggcactatttaaatagcctatggttctattggtgggaattaaattaggacagtcattacagaaaacagtatgaagattgcttaaaaaactgaaagataggccgggcgcggtggctcacgcctgtaatcccagcactttgggatgccgaggcgggtggatgatgaggtcagcagatcaagaccatcctggctaacatggtgaaaccccgtctctactaaaaaatacaaaaaaaaaaaaattagccgggcttggtggcgggtgtccgtagtcccagctactcgggaggctgaggcaggagaacggcgtgaacctgggaggtggagcttgcagtgagctgagttcgtgccactgaactccagcctgggcgaaagacagagactctgtctcaaaaaaaaaaaaaaaaactgaaagatagaattaccatatccagcagtcccaccactgagcatatagccaaaggaaatgaagtcagtgtgtctgagatgtctgcgctcccatgctcattgagcactattcccaatatatggaaccaacctgtgtctatcgacagaggaagagataaagaaaaggtggttatatgcacaatggagcactattatccctttaaaaagaataaaatcctgtcatttgtgacaacacgggtgaacctggaagacactgtgcttagtgaaataagccaggcacagggagacatatagcacaagatttcactcatctgaggatctaaaaaggttgaatttataataatagagcatggaatggtggttaccaggagctgggggcaagcggggagggcgttgaccaaataatatgaatttctagttagactgaaggaataagtttttttttttttttttttttttttttttgaggcagagtcttgctctgtggcccaggctggagggcagtggtgcgatctcggcttacggcaagctccgcctccggggctcacgcattctccggcctcaggctcctgagtagctgggactacaagcgcccgccaccatgcctggctaattttttgtatttttagtagagacggggtttcaccgtgttagccaggatggtctcgatctcctgaccttgtgatccacccgccgcggcctcccaaagtgctgggattacaggcgtgagccaccgtgcccggccaggaataagtttttaagagctattgcacagcatgatgaccacagttaataataaagcattgtgtatttcaaaattgctaaaataatagattttaaatgttttcactacaaaaaaaatggtaaatatgtgaggtgatagatatgttaattagcttgatataatcattccacaatgtatacacatatcaaaacatcacatcataactcataaatatatacaattattgtttttcaattaaagaaaaattttaaaaacaacacatggccaggtgcagtggctcacacctgtaatcctagcaccatgggaggccgaagcagggagactactcgaggccaggagttctaaacctgcctgggcaacatagcgagaccccatctcaacaacaaaaaaattttaaattagctgggtgtggtgaggggtgcctgttgtcccagctacttgagaggctgaagcaggaggactgcttgagcccaggaagttgaggccgcagtgagctaagattgccactgcactccagcctgagcgacagagcaagaccctgtctcaaacaaacaaacaaatagcacatatgtacacataaaattgcctgcggcttgtctggctctctcataaactgtgagctctctgaggacaggaccggaacacattttccctgaataaagtgagcacatttccagccccgaagcctgagccgctgtgtcccacatcccattcaggaagagggggttgtcctagaagtagcagatctgactcaaaaactcaaggcaggaggggtaacaatgccagagagagaagtagcagggtaaggaggagaaagaaggaagagggaacggagcgaggaggaaaggaatgagaaatataaaaatggaggagtgaggaaggaattcaggaaagacaaggaatccgcacaggcagagacgcggctttatcagctctctcccttccagctcactcctctccactcccccacagaactgctcaggccatgtgtgcatttggctcaggactccagtgctggtgccagaagcataaaccagagggtgggagctgcgtggggcccagacgaggcgagccctgtggccgggccctcaggacgtggggccaggctgctcctcccagccgccccgggggggcaggccaagaattctagaaaccctctgctggggagagcccgaggaggccctggctggggtgacatcgggaaagcccagggggcctgctgcaggctgcgaggaagaaggaggccgaggtcatggtgcagagggctgaggaggaagtgaaccccagctacagggtgcccggaaagggctggacccacggggaatgttgtggcggggaccacatttggagcagctcgggacacaaggggttttgtcccaaaggagactctgaacagagccgcgggccccgtcctgggaaagccgcttgagggcacacctggctgctgcgtcccagaactgctgacgtcacagtcacctggggcggggaggggactggcgagctgtactgtttttttaagtttccaatgattataaaaagcagcaaatgtgggaaccattgaactggatcagggtcagcaaaacttttctgtaaagagccagatggtaaatatttcaggcattttaggccaggatggtcggtccctgtctcggcgacttgattctgtcgttgtactgagaaagcagccacatatgtgcaaaggaatgagcatggctctatctcgaagagacttttcaaaattgaatttcattgatttttgaaatttgaattttttaaatttgaatttcttggaattttcatgtcatgaaacattgttctgattttttcccccaaccatttaaaatataaaaaccatccttagctcacacctagtggtaggcaggatttggcccaagggctgtagtttggtgatcatggtcaggccagttctgccataaagaaatcagtgtggaagcagagtgattgcttagaaacttttagagcaatctgacattgctctggcacccaatcaagtgtctgctggactcaacatgacccaggtggggcgacagtgaacccacaaggtcagtgacacatagcgtgctgcttcatatgtggtcagtgatgggttggaaatttaaaaaaaaacaggtcctttatacccagaaggtttgaaaagtagggatctcaaatcattcctttgaccccagggagggtttgaatcttcccaccacaatcatacaatcaccctaaaatatatagttataactacagcaggcaaacaaaaatatacattttttgtgcataggaaaaaaaaattgaaaaggactatagcaaacgtttagtgaagattctttgagtagaatgtcaatgcatttttctttctttatattcatctgtgttttccaagttttctttaacgaatatgtgtgaattttataattaagagttttatgtgttttcttaaaaacaagtggcttttaagaaattctctggagaataatttctccattggacaatccttcccagtgtctcccaagcgttcgggaagtgctttttcatatttaatccacttttagagaagcagggaagagaaagaagaaaatggaaaacatatgttgtccttctgactgcagagccccagttcttgtcgttcattgttatttttaacataagactcatgggcagtagtgggggtggggcatcaaggctggagatgtcatgaatggtcatgagtccattgtcacaggaccgaagtgagtggagcctcctatgctgacctctcaactctggtgtcccagcaaccagagcccagtgtatgtccggttgctcaggaactgcaagaaaaagtgtgggagaaagttcacggcagcagcacttactgccaaggaaaaagcacaactctgagtgctgggtatcatgggcctcagtggacctgggttcgaatcctgacttgaccactttttcactgagaagctcaggcagagcactgacattttctgagcctcaatttcctccccaagataaggttggggggtggggggtgggtaaacacacaacccccaagccgagtgtcccagaggcgaagaagactgcttgcatgaaagctcttgacactagcagacattaaatctgagctcttcctggctgctctgatgaccagggtcaaggtcatcaccccaggccaagggcagggcataaacctctgcaacttggactcaatcctagaaaagacttcagctggagaagaaaccattgctgctttctttctggactccagccgtgtgtgacacacaccaggggcacccatgtaactgtgcatatacttacgtcccaaactcagccccaaccggaggcagcccaagttcagggtgtcctttgctcataagctgcactgcccaggtcagtagccatatgtggctatgtgtaaagatttaaattaatttgatttaaatgaaattaaacatttaatttatcggtcacagtacccacatgttgcgtgctcagcgaccactcgtggtgcaagaacattgccatcagtgcagaaggttctatcagacagcgctgctcggtggctcagtgcagctccagaagacacccctagaaagtgcagacttctggtcatttgcaaaagtgtcctctcatttctgcaataacaacttcactatatagggaaacagaaacctataaaaatgtcatctagtgtctggagtatttgtgggatgtgcctatgagaaagcagctccctgggtgggtgaggtctgggggtccccctgcaagcctcaggccctgaagctgaaagaagcttctgctcactggctgactgctgttaacatacagtcgataaagagatggtgcttcttgtttctttaaacaaaaactattttaaggaattcttgtttcaaaatggcttggtgctattcacaggaagaaaagaaaaagggcagccttatgcagtgaggctctctgggaaccatagccaggacagctctgtgggggccgaaacaaactcaggagtcccagaacctacagagtggggctccacatcctctatgctccagcccaggctcttggcgcccagaggcctgctgtggctcggccgcatggcaggacaacctgtctctatggggtggatttgcctggaatgtggatgggatgggcttgtgctgagttataataaaccttctctcacttcgcatccagctctgtttgcccagccttctctagagagccttttggaatcttcttttctattgcagccctggctcctgccacatggaacagtttgaacaatctattccagccttagataggctgtgttcctcccccagaaggtgtagaagctgctggcagtgcctacccatgccctcaggccatgccacatcagggagcatgaactcactttggctgccagcacctgtgtctcttctcctgagctcacctcacccacatgcagatgtggccgtccaggggtatccaaattgtgtgcaacagtggatgataacacatgtggctaccccctcaccccttagaggaataactcaggcattgccccagagtctgcagcactggagccttagtcgcccacggtggtcacatgatcagtcctggtctttataccattacttcccgggatcacctcccaaatcaaatgtttatcttcaacattcttgttgtagggctgcttctgggaaaaccccactgaccactaaagctccaattaaccttaggttgggttctgggagaagctaagactgaagtgcacaagaaagttctagaatcaagtgagaaatgtgtattgaaatgggaggagatggcctgtcttttgaaatccacagagaagaggatctgagggatttctcagtgaaggagaccagctgcttctctgtggagtttggagccgcttatccagggatcctgaagactcaagaggatccccaagtttcaaatatgctcttccagacactcagactggtaaccatgtagtggaatctgcctatacttcttccaaataatagtcctggagggttgaaaggaacaagaaaggcgcacaaaattctcccctgtgaggtcagtttcaagctctcacctaagaggggcctggactcctagcagaggctcagcccacagtggtgccaagcccaggggggtgctgagctgacaggggtgcccagccgacaggggtacccggcccaggggaatgcccagcccttgggacccaggtccagtcattgctcctctgccctgtgtcaagcaagggaggcccctcaggaggcctggtgagcaccaagaactcactggaaaccagaaggcttgggtgccaaacacaacacattgtggtctcaggtgaggatgggggaatgggtgtcacagggagggaagaggcaggcgcatcaagtccatcgctagtccctgtgcaggaggagagagcaggctgccatcaccccatctcttcaccacagagacatggtcctctttctgccttcttcctctttttggtgaggcagacaccctccctgggctcagtcagagcaccccccccacatcccttcatccctacagcataccaggaaggcaactcacaaagaggccacagcgcctgggtacatccacaccccagcccagtgccctcctgaaaccagggagcgcagccgtcctctggtggaaaactgagaacttaaaaacgtcctcattggctgcatttccatgtctctggaaaagcattcacaaccaacccatgcttgagaggaagctttcatccataaatgctaataacagcctgaaggctgaatcccaggaccaagggtttcctctccttgcagaaccaaattgttatgtctaattctcggttgacttttccaggtggctccatggttccttcagtgtggtggcactggtggcccgtgggaggcagctggctgacagcacggactgtctttgagctggaagagtcaggtgagttgcttggtgtctgggaaaggggctaggtctgatcagagaagcaagtcctacctgtgtttacctgcctggccccagaccctgctccctcctttccagggtccactgagcacagaggaaatggagccaggtagctcgttgcctggcttattgtgttgttttggcttttaacttttaattttaaattagtttaattttagatttagagaaatgctgcaaaaaatagtacagagagttcccttatattcttcagcctgcttcccctagcatctgacataaccacagcatgattacaagaaaattatcaccggtgaattgaagttaatgttagttaactaaatagcaggccttacttaaattttaccaatttttctgaaaatgccctttttctgttgcagaattttattcgtgatcccatactgcattcattgttattttttctttgtctcctgtggtctgtgacagttcctcagtcttttcttgtctctaatgactttgacacttttgaggagtactggtcagtaattttgtagaatatccctcagtttgggtttgttcaatgttttctcatgattggagtgagagtatgcatttttggcaagaataccattaaaatggtgtatgtccttatatcaaagagctcactacgttaatgtgtcttgttactaatgatgttaacctgatcatgtggctaacttggtacctaccaggtttctccactataaatggactaatataatatatactgtttggtgccttctttctcaataaattttttagattcattcatccataatgttgcgtgtattgtttgttcttttttattgctgtaaagtgttccattgtgtgactataccagcacctctctcacctccaggacaggtgaggaacatcagctatctttctctccattgcctacaacagtatttgcattggtaccactgagtacaattatatggtgcacaactagtgcagctacacatggcaagctgaagtccaaggactgcctgaatcacaatgcaagttctcagatttctttacccccagagaattgattctattgcacgccgtcatttgggaaactcagggtgaagtacacactctagcatggcagcatggttaagtggttaatgaacatgagccctgaagtctggctctgggttcaaatcttgttgccactcatgagctaggtgaccttgaccaagttacttcctctctgtgactgttccatcagtaaaataggtttagtgatgatagtacctgtgccataggctactccaaggattaaatttaatttaatttaaaaaaagccttggccatgtgcagtggttcatgcctgtaatcccagcattttgggaggccaaggcaggcggatcacccaaggtcaggagtttgagaccagcctggccaacatggtgaaaccccatctctactaaaaatacaaaaatagctggacgtggtggcaggcacctgtaatcctagctactcaggaggctgaggcaggagaatcgcttgaacctgggaggtggagtttgcagtgagccgagattgcgccattgcactccagcctgggcgacagaacaagattccatctcaaaaagaaagaaagaaagcatttagcatggtgtctggcatagaataaacactcaacatgttaatagtgttattgttaataaacatcattgttggccaggcacggtggctcatggctataatcccagcactttgggaggccaaggcaggcggatcacctgaggtcagcaattcgagaccaacctgaccaacatggagaaatcccatctctactaaaaatacaaaattagccgggcgtggtggcgcatgcctataatcccagctactcgggagtctgaggcaggagaatcacttgaacctgggaggcggaggttgcagtgagccgagattgcaccattttacttcagcctgggcaacaagagtaaaactccatctcaaaaataaataaataaataaataaacataattatttttatggattatttatttcttgttattaatattataatactactcattagctttgcagcctccatctctgagggcatggtttgaatgagcgtgtatccctaagagctgccagcaaacggaagaagagttcctgcacctcttggtgcctgaatggtccagggtcaccaacaaataataatactcacagcatgggttgttcgtcaggattctacagagacatagaaccatttgtgtgtgtgtgtgtgtgtgtgtgtgtgtgtgtgtgtgttttgtatgcatgtgtggagagaggaggagagagagagagagaggggcttattttaaggaattggcttatgtgaccgtggaggctggcagaactccctcttcctgcagggagtcagtcttttttctttgaaggccttcaactgattggatgaggcccacccacattatggagggcaatctgctttcatcaaagtccactgatataactgttactctcacctaaaagaaattaccttcacaacatctagactagtgtttgaccaaatatttggatgccgtggcctagccaagctgacatataacattaacaatcacagagggctacagtttgtggtcccccttcacatacagaggttgacaactcgaaagccctacagcagtcagtgcagataaaaatgggggggtgggctcaccaggcggacttgccttggggcgtagggggacttgggctgcctggcagtccctgcatcgagtcatggtggcccatgcttggacctaggccaagacatatcaggactgccagacagtattatttcaaataatgccaaaatctgaatttctacgtggaagtttctatttctttaatactggcaactagttaaatgtttttaattgtgtgcaggacaaatgcacaaacccaagggaaagacgtgcccttgggcagcccatttgcgatcatgacctacgcgatcttactaaatctgtcagcttccttgtttaaggtattcacagagcttctagtcataaaaattgtagttttgtaggggcgttagtgagttctttgaaagcaggatttctctgcagatccggagcagtgcttcccactctttagcatggatcagaatcccgggagggctgtgaaacagccaccacacctcaccctcatttctgattcagtgggtaggggtgagcacagaaaatctgcttttctaacaagctcccaggaggtactgatgttgctggtccagggaccaggctttaagaacttctggtctagaggggaaaaaagaacacgggtggacagcaaggagaagacatggtgacaagacagggcagatcctgcaggaggaggagccgggggtattgctttggattcaccaccatcctcagtcctgtctgcctccttttctaacatcctgatcttcacatctccaccaggatagtgagctctgtagtagaggcatcttctataagatgctttacccatgaaggacactctgaggcccgaggggcctgagaatgagtcttcttatttcatctttgtgaaagatgatatggataatggtgatggttacacaaccatatgagtgtgcttaatgccactgaattccacacttaaaaatggttaaagtggggccaggcacggtggctcacacctgtaatcccacttcgggaagctgaggcaggtggattgcttgagcccaggagtttgagaccagcctgggcaacataatgagacttcatctctacaaaaaaaaatacaagagttagctgggtgtggtgatgcatacctgtggtcctgactactcaggaggctgaggcgggtggaggctgcagtgagccgtgatggtgccactgcactccagcctgggtgacagagagagaccctggctcaaaacaaaacaaaaaggttaaaatggtgaattttatgttatgtgtattttactacaataaaatatatgttctatgcttagagatatgtatatttgtaaagccctggagtagacccaaatcagcagcatagatgccgagggaccgacaggatttgcgctgggaatgtgccagaaggaagaaacccttgagctcacctagccattctgcagatgagctgactgaggtccagggcggtcacctttgctgtcaggactggaacctcaggtgcgtcctcactgagcatctgaggacattgccaggtacctgttcataagaaccctccagaaagggctgaatagtgctcccttcccaaacacaagggatatgttcatgttctaaagcccagaacctgtgagtgtgaccctatttgcaaaacaaggactctgcagatataattcagtgaagggtgccaggatgagatcatcttggattatccaggtgggccctaaatctagcaataaatgtcctcattagagatacgcagaggagagactcataagtgagaggagagagggcttgggaagatggaggcagagaacagactgatgcagccacaagccaaggagcacccggggccactagaagccggaagagaaaaggggagatcctccccggagcttgtggaggggcacggcctacctgacaccttgacattggacttctggcccccagagccatgagaggatgaatttctgtgttgttggccacacggtttgtggtggtttgtcacagcagtactggaaaacaaatgacctccataaatggctgaaaactgaagggaggagaaggggaaggtgctggtggagatggcaagtactgtggaaatagactcatcctgtctgggcttctcaaaccaaagctggcctctccaacaatggcaagatagtcactgtattctcagggtgtcatcttgacactcctccaaactcttgcccccaagtcacttgactcgacctccaaatggctcgctggaaagccggctgggagcagaactcttacctccaagcagctgccccatatataccaccccaggcccctaagaggctgaagctgaaatccccaacccacccttggtgggctctgtgacgcccataggaaaaagagtggaaaatcctacagaattcctgtgcgatcacagtagggtgaagtcctgcctccactggcccacccaacccaaatggaagtcaagtgatggcagtaagggacaccccagctcccctgcaggaaacaggatttgccctgctgaaatgcgtggccctgccctgcccagctggggtctaacagaggcttccctccaaggccgagagtcagaagtccagcactgctctctgccgctcttggctgcggtgccagcaggtctccccagcatcctgccggtctctgccctcctccaggcacaaaccagggtctccacagctaagccaacgtgggattggtcttctccaggctaatccagctgaaccaccccctctgaattagaaagggccccaggccccacgtctaattggacactcacaatgaccagaaaatcaggaagaatgaaccccaaagtgctcacaaatgccccattctccgctccccaaggaggccctgtccacaaacaaatgggcaagcaacaggccctttccccaacctcctggtgggatgatgccctggcgacgccacacattctttcttgcccagacgcggttacctcatgtgcccagcatttcctatgaagaggaaaaagccatcccaagcccatctcaggaaacatgatctctggccagagaggcaacagtctgagaggaccaggctcctgccacattgtccccagaaggcaagggaaaccctgggctctaaatccacagcccccacctgaaaacaaaaatcaaaaccccactgattttgaaaagaatttcctatccccagagtttctctctttctttgattctttacactttaaccaaatatcttttgcatttattatttgactgggagacacatgcctcccagggaagcacccaccaatatccagcctcctggcctgtgccccagtcagtgccatccacacccttagccagccagcaagggggcaaacagatcccccaggcatggacttgaagctgcagcctgcggtgtgagatgtggttcttggatcagagaaagccacagatgtacccaagacaggcatctcatctcctcctcctgtcacttgtctcagcctgtcagtggctcgtcatgaagggggtcaggagggggccctgaagccacgctgtctcccacctggatggtcccatgagcagctggagtccctaaatccagcatcctagtggtctccaggctctgcagccatttgtctttggtccaagttagaaatgagtttgagatactacagcactggtagcagaactcttattttttaatttttattttttgttttgagacagggtctcactctgcagtggtgcaatcatagctcactgtagcctggaactcctggactcaagtgatcctcctgcttcagcctcccaagtagctgggactacaggtgtgcaccaccacacctggctaatagtggacttaaaagcactagtatttgcatctcctcttagcccatccgccccactatctctacccttctctgggcaataagcttggagggatcccgtgtggtggccctgggctccggccctggctcagtcacggcagctgtgcaggcaggcctagctcacgggtccaaatggcggcccatgtgccatatgtctgagtatttaaacactataaatcaagcaaacaaactgttcaataaaatatgttccatgctcctactttgacatatatgacccatgaggctggatttgagttcaggattctagggctctgcacggttctactccagagtgtggcagtctaagaagagttcaccctggccatggcctggcctcttacctgtcccacaacaattctgtctggcattgcagggggtcttgtgtgcatgcacacagatactcagcctgaaatccaagtcccatccacatgtccacgaagagctaccacttgatagctcctgcacctacctgctctagtctcaggtcacttttggggggacacacctagaaacaagaccaacatgggtcctgggaggaggctcctaaccatttgggcagaaaatccagggttgggctgggcatggtggctcctgactataatcccagaactttgtgaggccaaggcgggaggactactttagcccaggagttccagaccagcctgggcaacataacgggacattatctctataaaaaaattttttttaaattagctgggcatggtggcatgtgcctgtggtcccagctactcaggaggttgaagtgggaggatcacttgagcccaggaggtcaaggctgaagtgagctatgatcacaccactgcactccagcgcacgcaacagaacaagactgtatcttaaaaaaaaaaaaaaaaaaattccagggccccaggtacatgaaatatggcccagaaggtctcaggccctgagtagacatgatcccacagcaaccagactcctcagtctgtggggaggggcaaggccagaggagggccagagaagggccctctacagtactgggtgcggggtagggccccctacttgtgagggtctagggctgtattggtatgaccttgggatgctctcagtgtgtgagtctgctcaggctgccgtcacaaacatcacggactgggtggcttaaacagaaatgtattctcatctggaggctggaagttcaagatcaagttgtcagcagggctggtttatcctacacctttggcttgccttcttactgtcttcatggccttttctctgtgcatatgaacttctgctcttttcctcttcttctaaggacactaatcatatcagattagggccccacccttatgatctatgactcatttaaccttaattacttctttaaagaccctacctctaaatatagccacatttgggggtgagggctccagcatacatattctgggggagacacaattcattccatagcactcaacctctctaagcctcaattgcctcatctgtaaaaaggagatgataataaggcttgctccatgaagatggtgtaaagattaattggaataaagcaactaaaatgcccagcccagtgtctgaaacatagtaagttaagtaagcactgctgtgtaacaaatgactccaaggcttagtgatccaagacaacccccattctactatctctcacaattttatggattgggaatctgggcagggctgggttgggcaactgttctgctcctcatggctctaggacagtccctttgtgtctagaaggtaagttggctggtttgaaggagcttcacttacatgtctggtgcattggtggggacagctggaaggctgatcttagctgggatattgatcagagtacccacacgtggcctcttcaggatgaccagcccagggtagtcaaacttcttacaaaggtcaaagctcccagagcaggagtcccagcagtggaagtggaagctgccagacacagacacctaaggcctggcccagaaactagtatggcagcacttccaccattttctactggccaagtgcccacagagcctctccaaattcagcaagaagggacacagaccccacatcccaacaagaagagtagcaaagaatgtgtggccatctttaacctaccacagcatccaggaagtattaactattgtcatttttcaaacatggaaggtaaaaaatgggaggccacaagagtggtggggtccttggtggtctttgacacccggaatagaaaagggtgagtttttggtacttttaatgttcagagcctctcccctctctcatgactccactaccttacccatctcacgtccagtttcagggacccttgcatcacacgagttaaacttcagcttaaagttcctgttgagtgcggtgcctgtcaagagctgttggtgggagacacatgggctttcagagatgccccgccctccctcatgaagctcgcatccagcccagggaataggaagataagcagtgctgtgctggtagccagctttctgggggatgggaggaccccgacttgtaacatttgctgatttccctggcataagtaaaccaggactgatttcaaactgccaaaatgacttcgatgaacccagagttgagaagagattcccaaaactggctcttgcaagctgatgcgtgcttgttccaaagatggaaacaaggcagggtctggtgaatgccaagcataaactgcaggaaagagtgggtccagttgggggtaggatgacggggaggaggcattcgggatgaggcttggagaatgggtagaaattactgaaggaggacattccaagcaggaggaacagcattaaaaaagatctaaagggggccaggtgcggtggctcacgcctgtaatcccagcactttgggaggccaacacgggcggatcacgaggtcaggagattgagaccatcctggctaacacggtgaaatcttgtctctactaaaaatacaaaaaattggccgggcgtggtggcaggcgcctgtagtcccagctacttgggaggctgaggcaggagaattgcttgaacccgggaggcagaggttgtagtgaaccgagattgcaccactgcactccagcctgggcaacagagcaagactccatctcaaaaaaaaaaaaaaaaaaagaaaagaaaagaaaagaaaagaaaagaaaagaaaaaagacccagaggcaggaaaacccaaggtataccaaagaacatcgaggggcagggtttgtagtggacagcacatgaaggatggttaaagatctgggtagaaagccaggtgccgtggctcatgcctgtaatcccagcgctgtgggaggccaaggcaagcaaatcacttgaggccaggagttctagaccagactggccaacatggcaaaacccaggtctactaaaaatacaaaaaatcagctgggcatcgtggcgggcacctgtaatctcagctactcaggaggctgaggcaggagaatcacttgaaccaagaggcagaggttgcagtgagctgagatcttgccactgcactccagcctgggcgacagagggggaaaaaaaaagatcttgctggaaaaggtgaggtgggctctaatgatgaagggacttgagagcaaagctggggggttaacatggttaaaagaaaaactttagacacatttaacaaagtttaattgagcaaggaagaattcttgaattgggcagcccccaaaccagaataggttcagagagactccagtgctgctacgtggtcagagaggatttatggacagaaaaaagaaagctgcagccagaagaaggaaatgtggtacagaaacagccggaccggttacaactgggagtttgtcttacttaacagttggccacttgtgattggttgaagctgggtgattggcacaagagtaggttacagtctgtttacacatccagctaggttacagttcactgtgtctggagaaacctttaggcctaacttacaagatgcagctttaggccaaacctaaaaaacatttactacggagggcgtcagaaggcttttgagcagggattgacatgatctggaaggtgcattggaagtggggtgaacttggaaagtgggaccccctgaaaggagacaaggaggtgggactgccgatggagcagaggagagtgggcccagctgcatagattggctctaccgtggagatgtcaaaggtgtgggctgcgaggctgaaagccaggataggggatgatttgctcggaggagctgttctccagggaaatcagaaatcttcatggtcaagtcttgaaaagttttggtctccagacaaaggtttccagtggcagctcctggggagaatctggaagctagggacttccccaaggccttctttccagtaagcagccccctgcagccaccgcacagaccccctcaggcctcaggtccctcttgggcccgtctccactgtgacaaggggaagccaggacagggaaagctcacggtgagtttgaacttgagatgcctggggctggcagatcagtgctttgttcctctgtcctgtagtattccaccaaccccctggcactgtcctgaatgacacgtgtgttccttacacacgtgccatgctctacagcccatctagtgcgtcgggaggcagcatcccatttaatccatgcacatcctgtctgagagtcgctatttataagcccatttcataggtgaaggagctgaggcccaaagaggtgagagacttcaacaggcagtatgtggcagaacgagggctcacagggcctaacgcttgcgccttggaaggttcagcctgtctggggacacaaaacttgcactcacgaaataactggagggaaataactggagggaaataaagaagagctctttctggggtcttttccaactcaacaaccctgacgaccccggctctagaaaagtcccttggggaaccctgccaggacaacctgtttcatctctaagtgtttattacacaaacatatctcttatccttgatccaaatgaaatcaccgccattcatatgtaaccaggatataactgggccatgctggggcccatctaaacacagtggcctttgaataaacacagacctctcccaaagccctgaaaacctttttttttctcaagtctcttgagcaggcaaacataggaggagaggaaagagttgggggtcgggagccatgtgccaaacccaacgctgcccactgcaaacttcttacagagtccttctgtccgtctctgtctccaaagcccacgccacagggcaggggctcacccagccctccctctcaccctcaaactctccgccctgccagcgtcctgtctcactcccccttctccctcctccccctcctacaagccctcttccagaggtttcccttctgagagcagctctagaggctttattttgaaaatcaaggtagcccattaccccagttagcacaacgaagggctgggttaggaagtgggtgcctcctccagaggccaagggagaggggaagtgtttgtggaagtcccttcttttaccaggtgtggtgaaaaagatgctgagcggcagctaagggtacctggacttagctcagtcattaagtgtgcgaccttgagtaggtgatttcacccttggacctaagaatagaaactgggtatagtggctcctccctgaggagagtacagggaagagagacgcagtgaactttgaacccactaggtttggagatgaagagtggttcctgccaatggcacagccttcatctgatcataaggaaacagacagacctgaacttgagagcatttcctgaaacaatgggtcctttaaaatgccagggccatgaaggacaaaggaaaaagaccaagagacaagacagtggagggcagggtgtaatccgggatcaaatccttgacgtggggagggagtttctataagggactgtacatcagatagtagctatgagtcagtgttctatctcttgaatttgataaattgcaccgcaggtgtgtaagaagatgtcttcatgtttaggagatagatgctgaaatatttaacgataaaggggcaggaggtctccaactttctaaagtgtttcagaaattaataacagtttgcgtatatatatgtgaatacgtgtatatacacacatatataagagagagaggcaaatgttacaagttgggaaacctggatgatttttgtctcatttttataagtttttttctaagtgtgaaagtatttcaaaacaaaaagttaaaaaataaaaattgaaaaaagcagcgatacataagcgctctgagttttatgaattttaatcaattaaagaagcttgttgttactccattcagtcattcattcaacaaatattggctgagctcctacactgtgtgggacactgtgctaggtgtcaggatgcagcgaacaaaaggcccggcctagcgaccagaccaaggttgggtctgcagtgcattccaggggcctccccataacccccaacccctcccgctttgagacccaggctctccttgccctagaggccaggctgtccctgctgccagggggcccttcctgagaactgccctcacctgaagagacccactttgaccaagcttatgtcccctcctggcatccaatgtctggtcatttgggcccccttgcctggactggaataactccaaagactatcccagcttcagatctcccacagggccagctccagccctcatggtgacaacatcgcagttcaactcctccctctgcccaagagcactgtccgaaaacttcctgcatataacctctgtctcagagtttgtgtccgaggaacatggtcattacagagtcccaacaggaaacaaatgtcacaatcaaattaagagaattccagatgacttattaaaaggactgtttacaaaggtatgggcagggtgtataagaccaccaagaaaaatgcagtgacctggggctaggaacaattaagcctttaccaaaggagatagctacgtggaaaaggcaaccgttggcggagtaaggtccttcagctgagactcaaccagcccgagatgacccagcagagacggagccacaggaataagcaaatgcctttcctcactctcctcgtccccttcctgctactcctgcccgggccccccattggccacacccagccggaagtctgaagaaggatgagggtggctctggtggcggacggaagacctcagtacagagtcccatacagcacccgagcttgacccctctgggagtgtctgatgaaagctctggactctccccaggaaatggatcataaatacacacacacaattttacacttaattttaaggaattcatggctgctctcccaggaagcccaggcacccgagattaaacaccacagtgctatgaagtggtagaagcagaggcacaaaacacgagtgattgaagaagggaagagaaaagcagaaagaaagggaggggcactgatgtcctcatcttacagagctgggaatcagcgactgctgtcagaagaggaaatgctcatgcaggagtcaaaaatagtcatgaaagttcagacattgggagtagtgagctaaatgctcatcttaggtattggggagtgaatagctgttgtctaaagatggtaactgaggaacggaggtataagtatgtgatttggagtgtggagaaaatccataaacagcaactggcaaaagatgctgtcttgggggagtaggactgggagtgaacaggggcaagtacagcaggagagacacgattgcttttcattgtaagcctttctgatgtaactgagttgttgccactatataacacacacacacacacacgcacacacatatgtgtctgtgtgtgtatatatataactttgataagtataatttttgtaaagaaacctttccctattaggatcttccagcacgtctaacctcacaaggcctcagagccagttcaacacacatacccttccagcagactggcctgtgcccacctgcagagcagaagtggccctgcttcagccacctatttctgagtcacaaaatactctgaaacttggtgactcaaaacgacaaaaatgtatcatttctctccattctgtgggttgaccgggtgtttcctttgctttgcctagtgttagctgggaccctgggatggctggaaggttacagaattgcctcactcacatggctccaccgggctactggctggggatctgcggagctgttgactggcagccttggttcctctgtgtgggcctctccacttggctgcctgggcttcctcacagaatggcagtgagggtccaagaaggagccattaaagaagtaaaggcagaagctgaaaatgactgaaaccattatacttatatagcatcacttgcactgcattctactcattaaaagaagtcaaaggtcacctcaggtccaagagcagggaattagattcaatctctgaatgatagcagtggcagaaacaggaatgcttcatggcagagggaaaatactccacaggatgctcccattgctccaacaattctgccaccagccacacctccacggactgcctgctggagacttcccatccaaacttgtgcttctgcacacgtcccagccctctcagatgcatcctctctctcagtcttctctgtcccgtgcaacccatggttctagattgacatggtcaccttggctttcggtgtttttattgttatcttaaccttcatcagattttattatttatttatttttttaaatttataatcatcttcttggagaatgattcaccaaattttaaaatcccagacaatataaactaagtcttccaaaatactctgtatatcctactgaacatcatttccatccctcccactgagaattatagtgaacagatgcaatcaatgtttaaattatgtatctatgaatatgtaatttatatatccatacttacaaggctgccacattgcataactccagggaggcacttttatgttataggctatgcaaatggtgtcccctggaggtatgcagtacgcagctcatacaactgaacatggccttcctggatatgggtgcttggtaagagcatatcttttattcgacctctctagtgcatactcattttagggcagtggctctcaatctgcacattataatcacctgggcaggccacactgccaagcactaaaatctgaatcacctcgcggtgggacccaggcattggcgtatttaaagttccctaggtgattttaacatgtagtcaaggtttagaaccagtactctcaggggatgcgtacagaatccttgaaaagggttttgtctttggtaaaagtgtaaaaataattggcattcatgtatagaaaaaaaatagaaagttgcaggaaactctaaaaaacaaaataaaacaaaaccagttccatgcactgaagaaaatccctgttggggtttttctttcttttctccatgaatatcctttgccccctgcagtcacacagtgcagaaagctttgctgggcttcaccctgcctctcacttcaggtggaaggtggagagggatcatggggctgttgttggtgaactttgcttttccctctggccttaggccaaaaatgtgagacttttttgtttgcagagattgtcctgttcatcccttaaacaacctttcctggcccaacggacactgtaggacttagctgggtcaatgtcatggtctataccttctgtggcctaagctggctccagacattggagagagaattgtattagccttgctgggcctcggccctgccttctccatgggacatctccagtgcaggaccctggctgatggccaggcctctgcacatccattctgtcattatccggagcaaccgcccgcacctcagccccaagtctcccacctcattttgttgggtcccttgttcctgaccggatacctagtctggttctcctcttcctctcctaggaacttgcttgctcctttgggaactctgagcctcagacctggcagagcaggagtgttacccactggcaacatccagctggccccatcgctgaccacctacgacctttgggacgtttggctccttatcttgaccctgggcttgacctgctattgctgcaccatcagagagaaccttcctcagcagccagccccggagttcctctactcccacctccaccctggctctggccccgccttctgtgatgtgagggattcatgagtgcatttgctctctccacaaatgtttactgacagccaattatgcaccaggcacggcgcttggtgcccacattagaagaggttcctccctcctggagcagacagcgaatacactgtccctgagaggggtgttaccaggtgataggaccctgcctgggatttggcgaccacttcccagaggaaaaggggctgggagccaagacatgcaggatgatgagtagctgatggggtaagggagcaaaagccttccagagagagggaatggcacatccaagggtctgtgcggaggctggagggaggccatcgtggtggggtctctccaagccagagagtagaaccaggtgaggctgtgaggtgggccgggccagagcactagatcctgtgggccaagcaagatcttagttggccttccaagacccttccacggtttctaggcaagagagtgacacaatcagacacacccactgatcaaactatccagctacagatgcaggagacaccattaaacactccccttgtatcatctgtggaaggagacagacactgggaatgtgatttgcctgccaggatgggaactgggtcacccactgaggggcaagagaagaagaaagactccagtgtgtgtatgttcgtacaccttctttgccaggcatggtggctcacttctgtaattccactgctttgggaggctgagatgggaggattgcttgaggccaggagttcaaaactagcctgggcaacatagtgagaccccacctctaaaaaaatagaaaacaattagctgagtgcattggcacacatctgtagtcctaggtactcaggaggctgaagtaagaggatcacttgagcccaggagttcaaggctgcagtgaactatgattgagccactgcactccagcctagaggacagagtgagacccatctctaaaaaggacacacatgcacacaaatagaataaaaattatgattaatcttgtcccttcaaaaaagcttgactttgctatggtttgaaggtttgtctcctttgaaattcatcttaaaacttaattcctaatatggcagcattgagaggtggggcctttaaaaagggactggatcatgagggccattcgtgtattaataggttcttgggttatcatggcggtcggtcattaaaaagccagcttgactcttgctcctacctctgccacaagatcccctgcagcacctcaggactctgcagaagaaggccaccagcaagaagaccctcaccagatgcagctcctcagccttgaacttcccagttccagaactgtaagaaataaatttcatttctttacaaattacccagtctcagatattcagttatagcaacagaaaactgactaatacaagcccgaatctcttcctgaagagcaattagtcaaatccaaattgaggcacggtctgtcaaacaaatgactgaatgctttgaaatatcagggtcatgaaagacaagacaggcccaaaggtggctccaggtgagaggagcttgagcggaggcacaatggagggaggcgggtcttgactggataaaaagggacatggacatgacaaggacaacttgcaacatttggacatgggccatgtaaagagaccaggcttgtatctacattaaattcattgagggtggtcatggtttcattcttatgtgagaaaatgctcactatcttagaaaagacatgtggaaatatctggataaaatctcaagatatctccgcaactattctcaaatatagaaagaaacaaaaaggcctggtgcagtggctcacatgtgtcatcccagtgctttgggaagccaagacagggcgattgcttgaggccaggagtttgagaccagcataggcaacatagtgagaccccatctctataaagaataaaaaaattagccagctgtggtagtgcacatctgtagtcccggctactcaggagcctgaggcaggaggatcgcttgagccaggagttcaaggttgcagtgagctatgatcatgccaccatactccagcctgggaaacagtgagaccctatctctaaaaatataaataaataaaaagagagggaaatgataaaaaaggaaagaaagaaggtggggtagggagagaaagagaaagaagaaaggaaattaaaaaagaaagagaagaaaagtgataggggagaggagagaagggaaggaaagatactgattttttttttgaccaatgaatatgtttatatagagatatagcaaatgtggcaaaatattaactgctggtaaatttcatagttattattcttgcaagttttctatggcttaaaatttttcaagatgaaaagtctgggaaaattaagatgaacataaaataaaaacactttttaaacaattgtttatgattggaaaaaaagaatctgactgttgacagattccaggaccacggcaactcttcatattttaagaataaacaaatctctcccatttagcctggtggctgggtgatctatccccacccctacggatgacaggatgtaaaaatcacttactttggactccacgaaatgggtgaaacaccccactgtgaagacgctgggggagctacgtattcagaggactctcggttcttttcaagcatatagacatttccaacagtgtaatgtcctgacctttctcacatgccaagctaaagtcatttttctttgaataagctgagatttagaaaaagaaaacaatgatccaggtggcctttaaagagtgaatgttataaagagcatttcccgcactggggctgggggctagggtgagggctggcggtctggatcacatgggttccaatggcgctgctcccatcacgtgcagcagcagccggcctcacccgggaatcagagcctggactggccactgtgttgcctttactcttagaactggagataatgaaaactagaactcattacatctgtaggtgcccgacatcgagtgtgccatgtgggcatgggtctcgggaaaggagcattttgacggtgctcctaagaacccaaaggaagacagtggcccagggagtggtgttctggttggctgatagggcctgcagtgggtgtgcacgcagccatggcttccaggggagccatgagatgcaatgagaatgggggacactgacaatgctcttgatcccaccctctcaggccacccgactgctcttagtgctgccggagcatctgagacacgtgcaggttctggtttctgatgacagcatccctagggagccaagagttcaggctctggagttgagagctggttcaaattctacacttgttacctgcagactgggacttgggaaggctgaacctctccaagcctgtcttcctcaaccctgagatggggtagaaggaggagtgcgctgatgattaaacgagacgaagcctcttactcttatacatggtgcagatcggagcccccagcgggtgccccacaggtggtagcccagccaggaagctgaccagggcagcaacctggaaatatgacaagatggagcaaatcacactccccagagattggaaggagcactttgtccaactgtggggatgaagacggggcggagcagtaccaagcatcactaggctgccttctggggagagaaggactctgtaactggagggcctttccttttctgagtagagtttccaagtttggattctgaactgaaccacctgagaagataatgctgaggcaaaggcgcatccagccgtttcactcctctccgcctcccttctaaataccatcaggcgctgcatacactatggtggtcccataagatgaccatggagctgaaaaattcctgccaaggaagttgaggctgcagtcagccatgtttgcatccctgcactccagcctgagcaacagggcgagaccctgtctagaaaaaaaaaaaaaaaaattcccgttgcctggtgacgtcatagctgtcatcatgtcgtacaatgcatcacttgtgtgtttgtggggatgctggtgtaaacaaacctactgcactgctagtcatataaaagtctagcacatataaatactgtatgtgctgtgcatgatacttgataatgattaataaactactatgttactggtttatgtatttgctataattttaatcattattttagagcatgtaccttctactaattaaaaaaaaaaaagttaattgtaaaacagcctcaggcaggtcctttgggaggtgttccagaagaaggaaggcattgttatcctaggagatgacagctccatgcatgttactgcgctggaagcccttccagtgggacaagatgtggaggtggaagacagtgatactgacaaccctgaccgtagacctaggctaatgtgtgcgtttttgtctttgtttttaacaaaaaagttcaaacagttaaaaaaattaaaaacagaaaaaactcatagaataaggatgtaaagaaagtacttttgtacagctgtacgaatgtgcttgtgttttaaggtaagggttattacaaaagagtcaaaaagttaaaacaaattaaaaagtttataaaatgaaaaagttacagtaagctaaggttaatttattattgacaaaagaaaaacgtattttctaaattagcctcagtgtacagtgtttctgaagtctacagtagtgtacagtaatgtccgaggccttcacattcactcaccactcactcactgactcacccagagcaacttccagtcctgcaagctccattcatggtaagtgctccatagaagtggacactttttatcttttataccatattctcacggtaccttttctctgtgtagatacaaaaacacttacattgtgttacaactgcttgcagtattcaggacaaagacgtactgtgcaagtttgtaacctgggagcaacagactacaccacatagcctaggtgtgtagcaggctgtacaatctaggtttgtgtaagtcactctgtgacgttcacacaacaaggaaattgcctaataatgcatttcccagaacataatcccccattaaagggacacatgactgtacatgccaaggaaacatttacggagcatccacttcaaaatttacatcagtggagaaaagcgattattcaaaagatcccaattcagccaggtgcagtggctcacgcttgtaatcccagcactttaggaggcctaggcaagcgaatcacttgaggccaagagttcaagagcagcctgaccaacatggtgaaatcccatctttactaaaaatacaaaaattagccggatgtggtggcacatgcctgtaatcccagctacttgggagggtgaggcaggagaatcgcttgaacccgggaggtggaggtcacagtgagctgagatcacaccactgcactccagcctgggcaacagagtgagactccatctcaaaacaaacaaacaaataaaagatcccaattgaatgggacaaccaagtggtcatctgggaaaaattaaagctaaatccccaccttattcctcacaccaacataaattccagatggatcagaaatttaatccctcaaactaaaaccataaaagcattaaaaatagaatacttttaaaaaaataacctcagagtgagaaagatctttcttaacataacacaaaatctggaacacattttaaaaaataataataaatttgattatataaaaaaatgtaattcaaatgtcaaataaaagtcgaagcacaaccaacaaagcaaaaaaagtgtttacaacacatgcagttggcaaaggctaatttccttaatatataaagcacttttagaatcaataagaaagaaatggcaaaggatagagcaaagctcatagaaatggacccacaactgaccttttttttttttttgagactgagtctcactctgttgcccaggctggagggcaatggtgcaatcttggctcgctgcaacctccgcctcctgggctcaagcaattctcctccctcagcctcccgagtagctggaattagaggtgcatgccaccacacccggctaatttttgtattttagtagagacgggtttcatcatgttggccaggctggtctcgaactcttgacctcaggtgatctacccacctgggcctctcaaagtgctgggattacaggagtgagccaccttgcccagccccacaactgacttttaaacataggagaagatgcttgaccacactagtattaaaagcaaaaattataattatgattgtataccaattgcttttagctaacagactggcaaaaagtttcatagcactgtgtgttgatgagagtatagagagacagacattctcaaatattattaccgggagtaaaaaatcagtaagtactattaccctagagggcattttgacaatatttataaaaatttaaaatgaacatatcttttggctaagcaatcccacttctgggatttatcctgcagacacatgggcacacatgccaaacaatctagtgacaaagctctctgagatagcaacattggaagcaacccaagtgcttggcaataggaaattggctaaataaatgtaccatcctgcaagggaatactagcaaccattttttttaaatgaagcagtactttatgtgctgatatgaaattatcttcaaaatatattaacatacatatatgctcttgcttgcataaaatgtctctggaaaacgcacagggcactggttgcctctgcaggggggaaatggaggcagggagagaggccacttatgttcgtgtttgattgcattaacatgcacatgtattacctatttttaaaaataacatttctatagttattacacttgggtaggtcggctgtggcttccctaaggataaggttagttcctcgattcaggagccaaatgccaaagggactccaacagtgattcacgtttggaaacagcccgcgggaatctgtgctgactcatcggaggacccagtggaacatggcagctccaaggcagagccagcctgaaaccctgtgaacatgctttaggacaaccagacggtcagagcgagatggggtcagggtgggggacaccctgagccaaggagccagtgacttccagaagagtgaggagaaaattcaaggctttcctcatgaaagggggcagagccgggacaacattcaaggaggccagggggatgttgagggggcctggctggagggcctggcaggtgcatggagagccccttcccagacaaagacctgggcccagtccctgagaagcactgaggcacccaccaggctggaagcagagcccttcccgcccccgccccggccacatccacagtttgctggcatttgctggcctccacctcaggcccagctgagtcaaggaattccaaggaacagccacctcttcccatgcccatcaaggcgaccttccatggtttccgtgggacgtttggtcacactgggctcagaaatctgcactctgtaaactcaccggtttctccgtgactggggtttccctttgtgcctcagtgttcctttgggaaatgttcaacctttttttggcctagttaaggagaaaggaatttttccagactcagtcagagatgttggctcagcttgattgggagggaagggtgattttaataaggccgggggtggtagtggggacaatgtgtgacccccccgggaagtgggaccgcacacggtaccggggtgggcagttctggctcctcctgacctggctgtccctccccagtgccatgagttttgagcctggttgccttggtgacccgttttcagtccttattcacctcctaaccatctcatgttctctcgagcctccttccatccccagcacagtccacacacaatgtaagtgctcaaaagtcgaactgtagcactgagttgaggggtggtcagccccggtgagccctggtgtctcatcatggtttccccatggctgtctccacccctcttccagaaaagctattgagaaatggaactctttgacatcacccctagctaaagttgctgaaaacagctcagaggagtgaattccacagagccctatgccccgcctagattcctggggcttcttgtctcatggagtctgcagagccgcgtccagacccctcatcctggaccgctacccggcatcggcctcctccacgtagtcttcttgctcccactgcaatctgactttctgccaaaccatttccctcctggcttcaaacttttgtcgggaaagagatgaaatcagcacttggagagctggaaagggaaaaacagctgcttttcacaaaatgggctagggagggggaagcggagcagcacagctggatcttggtgggaaagccagagtctggtgggaacgtacagctcacagcaggagagacaaacacacaaacctagaggggcccagcggcagcagctcaggggcttgcttgccaatggcaccttgtgccgtattcttcagatacagtcacatctcatatccacattaaccatcctagggctgtagagattttctccattttagagaggtaggcacaaaaaaaaaaaaaagatttctctttccccttagttctcctataagaataattatagtgcgtgtgcttgggacaaatagagagtggtggggcctgtggcatcaaggccgccaggtaaaattgctcaggttgggcggactctgtggcatcttgcaactgtggccgtgtggctatgtgggcctctgataacaactatgatttttcaagaggagccagggatctggatttttatttaaaaattacctgagatttaaacattggcaactaattcagaagctttacggtattgagcagtcagtagtacactgtgggccaagcaaaacatgtctgtgggtagagttggggctgagggctggagtttgagtcctcctttatgggtgagaactgacacatgtaccccagccaggagcaggcattgtcagcactctacccatcccccaaatcccttcctcccttttttgtttccgtgacccctccagctccgaagggctttcacttcctgcagtatgcacctgacttacctcatggtataacctgtttcttaccattccacttttcacctgccttcctcaatgataactctaacataatagtacataatagttgttttttgtttggttggttttttgttttttttgttttttttttgagacagagtctcactgtcgcccagcctggagtgcagtggtacgatctcagcttgctgcaacctccacctcccgggttcaagcaattctcctgcctcagcctcccaagtaactgggactaaggtgcccaccactacacccagctaattttttgtatttttagtagaaatggggttttgccatgttggccaggctagtcttgaactcctgatctcaagtgattcgcccgccttggcctcccaaagtgctgagattacaggtgtgagccactgtgcccggcctaacataagagtattttaaaatatcagtggcttatcaggcacgatgctaggtgcttgacataaatattggtttaaaatcaacacatctaagggagatcacattaatgcttcatttactaaatgtctaatggtttttgagttgtaaggcaaggtttcaaaagcctaatcaatttatatatatataaagttaacatgtccacatccttatgatgcaggtaatgggattattcacttttttttttttttttcagacggagtctggcactgtcacccaggctggagggcaatggcgcgatctcagctcactgcaatctccgcctcccaggttcaagcgattctcctgcctcagcctcccaaatagctaggattataggtgcccgtcaccatacctggctaattttttgtattttcagtagagactgggtttcactatgttgaccaggctggtcttgaactcctgatctcgtgatccacctgcctcagcctcccaaagtgctgggattacaggtgtgagccactgcgcccggcctattcacattttatgtataaggaaagtgaggcccaaagacatctgaccacagcttataagcagcatttcctggggatcttcttcagagggctcccttcaccttgcttggagggacagagagcccaaggtgcctagaaatttgcattctcctcccacacctgcaatccttgtccaatgactaatgggcacaagaatttgaaagtccagctcccttgccttgggttaagattaactgaagtgtcccctgcactcagagctccccctcaggatcaggctgaaaagccgtcatctgtaggatgtcgcctgtgatcacccctggcttggattcctctctaccccaacctgcttccttcagccccttcccagtttgccctgggagcacttccttaataaatcgcaggcacacgagaccttgtcccagatctgttctggaagaatccacacttaggcacagccaaggctaatgggcaactcctcttacaggagagaaagaatcaccctgccaggggctggtacaattgtttgagagcctcggaggacataggctataaaaggacattgctttctctgagaaccaagtagcatgctggggcccctcctgcagcctctctgctctcccaccccaccccttcctccacacatcatccctccatatagatgtgtcattgctgccaagcatccttccacccttcccgctgccctggcaaccacgaagatggtgtgtgtctgaccctgccctagctccagagtcctgactggagtaagtcttagctaccttgtcatagtggttggtacaaataacccagactgaagtcacttcgcatatgagattcccatggaacaccacagggagtggcccagaggctgggaacacaaattcaatctcgagggtgtacaggcttggaacatggggaaatccagcagaaaatcaagtggatctacagaaatgggcagacaagaaaagtgaaaggaaaggacaccagagcccaaacctggcttctgttgcttgccaacaaaagcattgtgacaattcccaggactcccagagacctgttgtgtgttttggaaattcacagagcacctaagactgagcagaaatacagaggaggtagacactggtccagtgtggctggtagatgctgacggtgggaagcacaggatctgcccagggtgttgggtgcttctgcagaaggatcagccctgccatgaacatgaaaaccccttgcctgatccctgcagctccagccagtcactaaatgacagccatgtgactactgtgtgtgatgggctcaccaagtgcatccgatacagcttgtgaattcaaggaccttgcaatctagttagagggaccacattggctgcatagggtgggggtaagggcatggtttggggatcagatggacttgggtctgggtagcaccaaatctctgtgggcctcaagttccttatacgcaaatgagagataataccattatctacaccataaggatgtgttgacttttgaaaaatatatttttataattaatcaggctttgaaaccttgactcacatataattcaaaatcattagacattttgtaaatgaagcattcatttgatctttagatgtgctgacttttaaacaatatttatgtcaagtacccagcatcatgcctgatgagcaattaatattttaaaatgttgactattatattagagttatcattaatgaaggcaggtgaaaagtgaaatggtaagaaacagcttatgctgtgccctaagtgacagacacagacaaggggtgaggtctttctaggaaagtttaggaaaagacaggcttgtgcctcctttaaaagacggggtgagggggaactaatgctgttacaaaggtctctatctctgatcagagaagtgctgggagccacatgaggaaagagggtttgcatgggcaggattccattaccaatttgagcttcaatcccaacatggctttcattccaaggtctttatccagaagtctgatttgagggataagaatcagggaaatgtcttggctcccatgttagtgtatgtgatgaaaagagacagcaactggcatttactggacctctacgatgtaccaggccctgtgtaggtgtttttataaatagtgtatctgtcagctattcccacaataaagctgtgtaacaaaattcacagcatacaacatcttcgggttacatggaatttggctggcctaagcggggctcagctgggcctgactcctggccatcggatgggttcaattctgcttagtatgtttcttatacttctggaaccagcgctacctaaaaaattattttctacaatgatggtaaaaaagtgcaggagccagcttaacagcacaagcccactcaagccttcacttacatcatgactgtcaacatccttgaccatagcaagtcacatggctaagaccaaagctaagggacattaagtatactctgccacctgaggccatagcaagagtgtggacatctaatattaatgctactacagggaagtgaaaataggaaattattattctaccttctacagaagctgttttattctatcctcttcaacaaccccaacaggcagccattattaaccccaatttagagattttaaaaaccgagactcggaaaatgccacagtaatttagaatgtctaagccaccaaactaagatttgtgccttgtctgcctggctccaaaaactggggtcttctgccattctgggcagcctgttaagttgagaatttgcattttaaaccatccatctgtgggcaacagtgacctatcataaaccacggtcaaaatcagagagaaggatttgagtacaagtaggtgatttgggaggtgatctcaagaagcaccatagagaaatgtggaagagaaacagggaagagaagccaagaaagggggcttactggagccagttactgctgtgggaggatgggctactgaggacaggggtgaccaatagaagagggtcacatacttcagagttgttgcaaccaacaggcggggagctggggtccttgtccatcaacttccaggagccattgagaagcaccactctggttcactgggtctcaatctaaaatcatctgggagtttgttgttgttgttgttgagacagtgtctcactctgtcacccaggctggagtgcagtggtgtgatcttggctcactgcaacctacctctgcctcccaggttcaagcaattctcctacctctgcctccagagtagctgggattacaggcgtgtgccaccacactcggttaaattttgtacttttagtagagatgggggttccccatgttggcgaggctgatctcgaactcctgacctcaagtgatccacccgcctcggcctcccaaagttctgggattatgagtcaccgcgcctggccaagtttattttttttttccgtgatggctgggtctcagctccagtgattttgagctgatgaggctgtgtcagcctgagcatgggactggtgaaagctcccccagtgacctgttggacatggtagtttgggaagctctggtctagctagttcctcggatccctctgagcctacaagttcgaggcctctttgaacaagctcagctgaggatggaaaccctgagaaagtggcccgtgcagctggagataaatcatttattggccggggctgcagctggtggcggcttgagaaatgagctttttggccttaactccactgtttgtgctcccgtgaccataagggaactgaacgcacagactttctttttagaaagaaaaaaaaaatgtcaagcatattttccaaggtttaatttccctccaatgtcctgaagaaacctttcgaaaagcttagactgcctcaaccccagtatctagtaataacatcaaacactttgaaatggagacccagtgtgactttgtttaactaaataaaacccagggaaggagagaaattaaaaagagcacgggtttaagagaagtcaaatttccaccaaaaaggtggaagagggaagctggttggtggagtaggatgggaggcagatgccgaatcccaagagtttaaaattcaggaaaagaagagaaatgcactgtctttgccagatttagcaaataaaaatatgggatgcctagttcaatttgaatttcagataaacaatgaattttttttagtgtgtgtcctgtgcaatatttgggacatacttatactaaaaatattattcattgcccatctgaaattcaaattgaactgggcatcctggattttatctggcaaccataaaacatacaaaaattggtctcaactggtcaggacacccttaaccaggtgtctctgagttaaattgggtgactctgtgctaaacgagatgtctctggtcttaactgggcatccctggtcttctcccatttgtaactggagtggaaatacccataaaggaagataaggaaataaatggatggaaaggagaggagacagagaaaaagggggtcttcatgggaagggcaggggcaccagcatccctctgcctgctttctcccacccctgagctctcagcacagccgagggacctgaggtcagagtccctgtccagagtgagaattcgcctttccctctgtgagctgaggatttggaggaaggtctgcagaaatcgggagggccatctgccccagccctggagaaatgagatggggtgctggaggtttaacccccaggcacggactcggggccaccccttccctatggcctgccctcctttgcccaatcctttcttccctgtgctgcctccatccgccctcttctcttctcctacctcctcatctcttaccctccaaataaggaagccagaggcagtggtgtggtcagggaggatgcctgcaggtctgatccctgcccccagacagaatccagttgccaatgaggcagctggggagggtttggaggaagggctgtgggtgctgggtggtgctggggatcctggctcgctgaccgcacagggccccaccgctggctccagaggactcagtgtagctgtctcaggcctgccagggcgcctgcattggagccacatcaaggtgagaagagggcctggcctgcaaggcagcaaagaacagctttattccttcactgccagcggctctgggaggtggaagatgacgtggcccagtcattccactcccaggaactgacccaaagaaaataatccagcccaagaaagagagctgtgctcagaaatattcacagcaacataagggaagtggtttcataaaccttggcatgtcagcaccgtggaatgttcctttatttcacccgacatttaagtgaccacttggtgacaggcatcctgccagctactgggtacccaaaggagggtataagccgatcccttttctctggggttcacaagcaaaatgagggaggttgagaatgcagcctccagagtcaggtagcgatgggtctgtacacctgtctgtcccctcatctgtaaagtggtgacaccccataggaagtggtgagggccagtggggtgacacgcatcacacacacagcacagtgcctgacatgcagtgagtgctcagcagttaccaactaccctcatggctcctcctactcctgcagggatgtgacaggcatggtgacgggaggatgtgtgagccgttaagagttcacagaagagggtgtgtaggcaccaccactgaagtatgcgcaagtgctgagagcagaaggaatgatggggtttaattctactggagatgtcaccaaaggtcaccataggccttaactcagctgggtcttgaaggatgtatagaagtttgctggatggacaagaaatgaaaagacatgccaggtagaagcaaacctgtgggcccagtgtgggcaaattcaactccaccagactcagctctccatcatggtccccagccttttggtgatgatctcaatctactcaagatgttttcaggccaacattgaaaggaaaggttctgggtctcttcccttttcttcccatgattctcagcccctgtgcaaatgttcccatctttcccagcagtctttgcactcttcatatcaagagatattagaaagaccagaagtgagccatttcaatgtccactcgcacacaaccgggtgaaaagatcccacgttcttgaaggaagggtctgtggtgataatattgattaataacagtcaacaaacacgacaccatacttttttttcttttcctttttttcttttttgagaacagggtctcacttcttgcccaggctggagtgcaattgcgcaatcacagctcaccgcagcctccaacttctaggctacagccatcttcccacctcagcctcggaagtggctgggattactgggctctgcagtagggcagccctgggtttgaacctagattcactattactagctgggtgaccttgagcaggtcaagcatgcaccaccacacctggctaattttttcttttctttcttttctttcttttctttctttctttctttttctttctttctttctctttctttctttctttcctttctttctttcttttctttcttttctttccttccttccttcctttcttccttctctctctctctctttctctctttctttctttctttctttagagatgggatcttgctatgttgcccaggctggtctctaactcctgggctcaagcaatcttcctgcttcattctcccaaagtgttaggattacaggcatgagccctcacacctgactgtttactctctattgagtactttacaaataccatctctgtgaattaggtattcttatcccctgagcttagataatgcagctgagttgacgcggcctgctgaaggtcacccagctactaatagtgaatctaggttcaaacccagggctgccagagcccattcccttacactgggtcatgttactaaaaatgccaaaagaggctgggtgcagtggctcacgcatgtaatcccagcactttgggaggccaagccgggtggatcacaaggtcaggagatcacgacaatcctggcccacatggtgaaacccagtctgtactaaaaatacaaaaaattagccgggcatggtggtgggtgcccatagtcccaactactcgggaggctgaggcaggagaatggtgtgaacctgggaggcggagcttgcagtgagccaagatcatgccattgcactccagcctgggtgacagagtgagactccgtctcaaacaaaaaacaaaaaacaaacaaacaaatacaaaaattagctgggtgtggtggcgcaggcctgtagtcccagctactcaggaggctgaggcagaagaattgcttgaatccaggagatggagattgtagtgagccaaaatcgcaccactgcactccagcctgatgacaaagcaagactccatctcaaaaaaaaaaaaaaaaaaaaaaatgccgaagagctaagtcagggctttgatcaagaaaggcgagaaggcagggttgagctcttcgcttgagagaaggggttagctggtgatgttgtcataagcccacgaggggccacagctctagacctgagtgctacacattgaccctcctcttggcaccagacactgccctgcttgtcatttctgtacggatcagggtcccagcacaaaaccaaaaccatgctagatcttccaacccagggagtttaatagagggaacttgttttgcagctttgaattgatgaacagccatatgaggatgtcgaggtcacccagaggttagtaacaacaggaagccactgctaccatcactagggctgggacaggaaaggacaaagggacaaggtggggtcatcagagttgatggttctggggcctctggcaggagctggagccgcagcagagaggcagccactgcctgacacacccccagaagcagagcagggagacacaccctgagctctccccgcctctgccctccaggcttctactcacttgtccaagcctatctgaagccagagggcaggggccctggaagggaccctctccacactgtagaacagaaagcagaaaggagagaaaagggtctgagagaaaacaggaggaggccagacacaatgtctaccccaacaactgcccttcaaggtcattgtttttaccccattgtagagatgaggaaactgaggaaacactcacatatccacacctgcacctacacatgtacacatcacatacacatatgcacacatacaaccattatgcacatcatacacacaggctcactgcttcactttgaagaggttaaatgactgagccaaccaagatgagacaacttttaggttggtggagacctaatttaaacccaggtcactatatcggttttcacagctcaggccaaactggtcacctccaggactttgtgaatcatgaagaatccaacaacaaaacaacagcaacaacagcaacaacataacaatgtaagagaccttgaagttccaaaggcttagcccgtgtggggccaagggtcaagggccctcggatgatgatggtgctcgtgtttccctctcctcctcggctccctaagtcccagctgcagaagaacattctattaagccacagccagcactctggttttggggactaaaggcaatttttatttccttctttgtgctcttctctattttccagaaggttttgttgttgtcggttttggggggttttttgtttgcttgttttgagacagggtctggctctgtcgcccaggctggagtgcagtgatgcgatcttggctcactgtaacctccgcttccggggctcaaaccatcctcccacttcagcctcctgggtagctgggactacaggtgcatgccatcccactagctaattttgtattttttgtttcgccacattgcccaggctggtctcgaactcctggactcaagcaatcctcctgccttggcctcccaaagtgctgggattacaggtgtgagccactgcacctggcctattttccagttttttgtgaggagcatgcactgctttgttactgggaaggacagatcatctttaggcaatattacacggtagcaggccccagatgaaggcttaacagaaagaaagttggggcaaaagaatggtggcaggaaagaggactggccaatacagatggcgtgtcaccgtcctgctccctccttccctggaagtggacaaaaccaggcaccattcacatgccatggtctgggctattcttaacataccctcacacatatgcacgcaaacctcaggtgcacaaatagacacatgcacttacacatatggcacacataaatatacacacacaaagacacacacacaccctcacaagcacgcctgcccatgatgcatgtgcatacatacactcacatatttgctcacacattcacacacatataaacacacctctcatgcacatacacactcacatatttgctcacacattcacacacatataaacacacctctcatgcacatacacactcacatatccacacgtgcacctacacatgtacacatcacatacatgtatgtacacgcacaactattatgcacatcgtacacacaggctcactgcttcactttgaaaatcggatttccaaaactttcctagcacaaccatctcacaagggtgtctctggcctcctcctctgagcagctcccaataacgccttccaggagcaggggtgccttctgtctgggccccagaacatgcactgcaggtgtcgtctcagggtgggctccaaagagcatttccctctgtaaccacaggctgggaggcccagcccatccccttgagcactgggcaacccgtcggcacccaggagctcagctctcaggaaggcttccagaagctcccttcaaaacctcagaagcagctccataccctcaggagaggctgcagtttgcagagttcacacttccctggaggaagcctatgaagccagacccacctgggccctcagaaaggcccctggagtcagaatgcttggatccagtccctgctcctctctgagccttggttttctcatcagtaatggaacagacctttgagctctcatcaagagcttgtagctaatactatagactgagcctctcaaccttcaaggcagctggagaggagtttaattcagtggataacatgcacccaaagtccttagccatcagtgtttattgctgggggttccacagtccctgctgatataaatatatatgtaacttgctccccccagagagcccagatggctgggaggtggaggggaactgcacacacctgtgcagtcaccctcaccacccctacaggttagccacagcccagtggtttggcaaaaacatctgccccatgcttcctggataacatactgagcagcagagacccaggatgggaggggcagctgggagctgagggcctccgggatggtctcaaacaggaagggatggcaggtgctatgcctgcaggtgcggggacagggtcacatgaatcaggtaggcaaggcatgggcctgtgacttttgaggaccaaggagggggacatgctcaggatgggctgaaatgtccctctgtcaccttccaaagggggtgcctagcagagatccaacttagggtttttgcttctttagagaaagccattgtcagctacatcgcagaatgggtgggaataggaagttaacttggaaagacatgaattgtcattccttggaaaaggggaatgagcttccaatggtccaaggaatcaggaatgagtccactgggaagcagggtaactctggtgtccccagagagccaggtctgcagtgacaccaggaagccctgcaatcgtgctgggctttgacctgctgggtgaggcccctgccccgggcctcaggccctgccgaactccatgctggctcttctgggccatagtcctccccagagtaaggagttggtgaggccaaggggacatgcccagctagatgatcacacacatccccttctagaaggtacccctcgtcctgagggtggccaaggggacgctgtctgcaagagaatgatggagtgtggttggccagatgtgtgtgcccagggcacctcagcatgaaggggactgggaggtgggaagggaaggagagggaaaagggaggcctcctacccaggctaaagtccccacccagtgatttctgcttagactggccacccttgtcataaaggaggccaggaaaggtgactgtgctatgcttaataatacagactctgtaactggtaagatcaggaaagacgattgagggcaggcagctggcagcctttctgtgcttcacttttctactaaatgcagcagaggggagagggttgccccaccccagagagtccctaccacagagcagacccccttagcacccaggatcactccaggagctgaggactatatccagcacccacaccttaaacttgactagatgcaattactcaaccatacactcacattttcctcagctggccactgaggtcagagccagctagactggacttcctgctgctgccctggagatccctgttggcactggagactcctggacacagaacgtgttatgagtcagaagcaaatgtggaattctctacttcctgccgtcacccacacgtggggcgtatccgctactgctgtataacaaatcatcccaagaatgtagtagttaaagataacaacggtttacttttactcacaagtctgtggatggtctgaatggttctttggatctggactgggctcagctggcctcaaatgggcctcacccctgcatctggagggagctgctggctcatctgggcactagctggtcccgatggtctcagcgggaacggctccttctgctttgcattctcgcctcctctgggaggctggcccaggcatgttcacagcacaggttggacgggtttccaagggagcaatggaagtgtgctgggcctcttgaggcctggacttggttgcaccacgttctattggccaagtcgcaagaccagcgtggattcaaggggtggagaaatagactccatctgttgatgggaggagcagcaaaggcacatcgtgaagggatatgataggggagggaataactatggctatttttgcttacaaacagcttactacaggaagtgtggccatctgccctccagcacagagtcagcatgcaagctgccctggaaaaattcctatgaaattttttttgcaaacttgtggccatttggaggttacgtggtgagaacattcagatatacgtagatatctgaccatggtagctgcagcactcagggccccaccagaaaaatagagccccagccaagtagttcaatagtgaattaatactagaaactacagcttgacctttgaacaatgaggaagttagggtcatcaactcctcacgtaattgaaaatccacatataacttttgactccccaaaaagtttagtaatagcctactgttgaccggaagccttattgataacacaaacagttgattaatgcatattttatatgttataaatattattactgtattcttacaataaaataagctagagaaaagaaaatgttattaagaaaatcatatgaaggagaaaataaatttattgctcattaagtggaagtggatcatcataaaggtcttcgtcctcattgtctccatgctgagtgggctgaggaggaggaggaaggggagggattggtcctgctgtctcagcgtggcagaggcagaagaggatgagaaggtggaagggccagcgggagaggcaggcacactcggtgtaactttatggaaatatatcatcatttttgtttgacttttttcctttctcatttctctgaaaatgtttctgtacagtaccaattcttcttccaccatttgctttagtttcagtgcccaaaccatagaagggtccatgtggtaaaaaaagtcaaaactgacttttttttttttttttgagttggagtcctgctgtcacccaggctggagtgcaatggcacgacgttggctcactgcaacctctgcctcccaggttcaagcaattctcctgtctcagcctcacaagtagctaggactacaggcacacgtcaccacacctggctaatttttgtacttttagtagagatggggtttcaccatactggtcaggctggtctcgaactcctgacctcaggtgatccacccgcctcagcctcccaaagtgctaggattacaggtgtgagccactgcacctggtcaacaatcttaagtcattggaacccttctgccagattgtctaatgtcagtctcttttctcacagtgcgtcttctatgttctttttttttcctgagccagtcaaatttagcagtgggggttgtataccaacttcagtgacactaacgttaataagttctgataatccactaccatgtcttgtttctcattgtccggctctggttcagaagcatttatctctatcaagttgtcttctgttaattcctttgtgtggtgtctgttagctcttgaatttctccaaaatccatatcttgaaacccttcactccccaaccttgttgccatactcacaatctcttttcttgattggctgtgtcataaatcctgtgaagtcatgcacacctagacacagttttctctagcaggaatttaatgtctcagacttgatggctttcacagctttttctataacaacaacggcatcttcgatggtgtaatcccaccagactttcatgatattttctctattggggttctctctcatagcactgacaatcctttccatggaatactgtgtgtattgaactttaaaggttcttatgacctgatctagaggctgaattggagacattgtgtttgggggaaaggagaccactttgacaccttcgctgttgaactcatggggttctgggtggcgaggggcatggtccagggtcaagagaactttaacaggcagtccctacctcacaaggtactttctgacttcaggaacaaagcatcgaaggaaccagtatagaaaaagagctctccttatccaggccttcttgcacaaccaaaagactggcaactggtgcttatctttccccttcaaggatcagggtttagcagctttatagataagagcagtcccaatcacaaacctactgcatttgtacaacacaatagagttagcccaacccttcttgccttaaatcctggtgctcacttctcttccttactaatagatgttctttgtccatttttttttccagaatagagtaccttcatctgtatttaaaaacctgttcaggtagacatcctctctcctcaatgattttcttaaatcatttctttttttcttttttctttttttttttttttgagatgggatctcgctctgtcacccaggctagagtgcaatggtgcgatctcggctcactgcaagctccgccttctgggttcagccattctcctgcctcagcctcccaagtaggtgggactacaggcacccgccaccgcgcccgggtaattttttgtatttttagtagagatggggtttcaccgtggtctcgatctcctgaccttgtgatccgcctgcctcggcctcccaatgtgctgggattacaggtgtgagccactgcgcccggcccttaaatcatttcttaatggcatctgggaactcgtctgctgcctcttggtcagcaggagctgcttctcctgttatcctgacattttttaagccaaacctctttctaaaattatcaaaccatcctttgctatcattaaatgctccagctttagatcctccaacacccttttgctttaagttgtcataaaacgactttgctttttcgtgaatcatattagagtctctaggtatgcaatcctgcacccacatgaaagctgcattttcaatatgaaaggaattttgcaaaaaaagtgcaaagtttttgtgcctgctggcccagaaatggcttcacgaatttccttttgttttttgcaatggttgttaggctggttcatttgtttttgaaatagccggcaacctcagctgcagacatcaatctatggtaaacatcaagcaattcaactttcttgtaatgtcatggctttcctctgcttcttgggagcacccccagcaccactagtggcacttcatgtgggtctcatggtgctattcagggtttatggtatgcactgcacacaaagaaaaatacacgagaaccagaagagatcacttttcactgcaatatgcagtgtatcattagagacaaactgctcacagggagatgatcagcatcatatggtgtttaagtggatacttgcaacaggagcttgccacaatagcaacaagaggtggctatgaaattatgacagtagtatggtatcagtacagtgaattcgatgcagttatgatttaatactgtatcttcgtttgtttccatttatcttgattgaaaggcaccatgtatggtctgtgtccgtatgtgtaagttttgataaattttaactttttagaatagatttgtgtatattttatggtagtaaatgataaaatagactcctatctacatatattttatgcattcatgacatacctaacttttcctgaattttcttgatatttctagaccatgctgcaagcttttttaaattatcacaaatctccaaaaaatgtttattgaaaaaaatccatgtagaagaggacctgtgcagttcaaacccatgttgttcaagggtcacctgtagttgcaaaggtgatggaagagctgaaaacctaaacgggagggtagagcaacccagaaagtagaaactgctacttccccagggctagaggaacaagggaagagagggtattattaggagccgaagttatggaggagacttggccactgctggaggcatcacctgaaacagaaagggctggagagagaatattcctggcttctctcttctaccaagctcaatctcctgccactgcttcccattgactgaacttgtcaggaagccagggtgcaggggagcctgggaaatgtagtccacagaggtcagggccgtgcaacacagcacagcagagaaggatgagggatggatctgaggacaaacaggaaagtgacagtctccaccgcctgagctgtgtgatggggatgagaagggccctgtgcctacctgaaggcagaagattgtctcagctgacagctttgcgtcttttctgattcctacagaaatggagagcatgagcagcaagggagaagtctttgtcaccctatccccaacaggaggggactgtgggagaatgatcttaggtggggagatgacctgtggtctggggaaccaggatggctgggttcttgagaggccctgccagccagagctggagatcaatccccgcattagcaagagcaaacatccagcactgtggggaagtcactatagtagctgccatagatgaagcatccactggtccaggaactaaccttcatgctttaggtggattatttcatgtaatccttttttattttatttatttatttatttatttgagatggagtctcgctgtttctcccaggctggagtgcagtggcgccatcttggctcactgcaagctcctcctcccacgttcacaccattctcctgcctcagcctggcaagtagctgggactacaggcgcccgccaccatgcccggctaattttttgtatttttagtagagacggggtttcaccatgttagccaggatggtctcgatctcctgacctcgtgatccacctgccttggcctcccaaagtgctgggattacaggtgtgagccaccatgcctggcctcatgtaatccttttgataaccctttgagataagcaccaagggtgttccataaaacctaaaaaaaattatagccaaaaaaaaaagattgttccagtacacatataactgaacaaaaaagtcctgaaactgaaaaatgaaaaatcccagaaggtctgagtgtagtgtggctgcttgaggccaaattagaccttctggtcaacatgatttcctgtaagtgaatagataaaaataagcttctgtatatgttctatgtattgaatcatacagtatcactatatatgttttttcattcaatatttcttacaatccagcattgtaaaagtttcacatgacatgacactttagaggaagaaatggaaaatcaggctggatgtggtgcctcacacttgtaatcccagcaatttgggaggccaaggccagaggatctgttgagcccaggagttcaagaccagcctgggcaacatggtgaaaccccatttctacaaataataaaaaaaaattatccaagcatggtggtgcatgcctgtagtcccaactactccagaggctgaggtgggagggtcacttgagcccaggaagttgaggatgtaatgagccgagatcatgccactgcactccagcctgggtgacagagtgagaccctgttgaaagaaagagagaaagagagaaaagaaagaaagaaaagaaaaagagagaaagaaagaaagaaagagagagagagggagacagagagggagggagggagggagggagggagggagggagggagggagggagggacagaaagaaatggaagatcagagaagtggaataacctcctaggatcacacagcttgtgaatgagaggcactgagttgctcagtgatggagtgtctaatgttgggtgtgtatgtactgactgtgtcccaaggccaattataacttggggaaggcaccactacctccctgtcatacaatgggtacattgtctgtcaatggcacgtggttgtacacacctccaggggtaaacaatcaaaagtcaggagcctctccagctctccctcataaaaatactgtatcctctagggagtggggttctctagtccagccccatgtgatatgcagtcccagtggggccgggagatttgcccaaggtcacacagctggttagaggggaaccacacaccaccacgtcctgcagctgcaaatctgtttcatggcctgcttcctctcttcttccctagaatgccttttttttctaccacagagtttctacagttcaaacctggagggcaggttgggttttgttttgtttttcacacactccttcacagattacaggagagattttactcttgaactgaaagtagaaaattattgttagctttaacacacagctctttctctcttccccaacccagatacattaggatcctcttgtcctatcaaaaaaaaaatagtaataataataataataataataataataattctatggggcagaaaagagaagaatttgtgagtttcccattcctggctggacatttcccacaaatggcagttaagtcttcattgactaataggaaaagagcagctccagccgcatgacttcacggcacaggcaaagtcaaaggcaaggagagctcaccttaactctggtgtatagacacagactccatgcctcttgtccaactcttccatcagggagccagaacgtccacatcttccaggttcctgtaggctgtgtttagggagagatgtaagactctactggaacttacgtgctgggagggccaatggtgctgacacttggtcttcttgctcttggctgatggatagcagggaatatgaagctatctatatctcactcagatagagatggacattccagtcaaaagctaagctacttctgaatgcaaagatggtgtatcagcttttgctgcataacaaaccactccaaaatgtagtggttaaaataactattgtttatttagctcatgagtcctcatattagccatttgggttgtgcttagctgggctcattcctatgtctttggtcagctgctgggtttgctgggcctgtctgatctgggatggctcagctgagacagtatgcctctgctccacgtggtctctcatcctcagcagcatagcctgagctttatgcacagtagcctgggctttatccatggtaaccaacaggctcccaagacaagagcagcagtactcagggcctcttgaggcccaggcttggaactgtcataaggtgactcccaacatattccaatggctaagtcaagtcaaaaggccatccctgattcaaggactggaaatcagccccagaagctacaaagtcacattggaaaggggcatagatttagggagggggaaggattgtcaccatgtttgcaaatgatcttcccctatatccatttaaaattcttctaggaacaaagtaggggtttcaggaaaaaaaaaagtgttgaatcaaataatacacccaagtaagagtttgtggcaccagcctgttgcacgcctactaaatgcaagccttaagcctctgcagtgggtagaccctaagcagtagcaagctggagcctgctagcactgactcatgaaagccaactgttaaatgctcaggaattttttgagccagttgttaaaccatcatagcttgaaactgaccatggtgggagcgtttacaccatgggaattggctagcactacaaatcagggtgctttttctcctggagagctggtttacccacacaccatccccgttaagctgaaggaaatactgtctcttccaacttgaggagtaagacagatacacaatggaagattatcacatgccaatcaggcatgatgacttcaatacaagaaataaactgagagactggagacagcagggaaaggaactcatcatttctgatgtgtagaaattacataaggcatcatggaggaggtggtcttttcagctgggccttgaaggaaatacagagatagccacagccagagggaaggctgcagcctgtggaacagccaggcacagaaagaggtgcctttagagagcaggcagccagcctagtggaaggggcttagactacaggtgttttatttagtaccatttttgcttcaagtgacagaaaatcccaaacaacaatgacttaagcaagttggtttaattctctccctgtaagcgattttgggaaatgattgtgaatgatcagtgctctgcaggcacagcggctctgcctccgaccagccctcacatctcctcttgtcccagactctcccagaacaggtgcatggtcttcttgtccttctctctccttcttgggtgctgcaggccatccggcagcctgggatctgacatccagcttccccactcgcagctgtgtgagctcagaaaggttgcctaacatttctgaatcctggtttccaacttggtaaaatggagcaacgtaactcacagagggttacaacaatgtggggtatagtgtctgtgcagaacttagcatggtgaccgacccagggtgggcactcaggggaagtagggtgtgtgtgtgtgcgtgcgtgcgtgcatgtgcgtgtgcgtgtgcgtgtgtgtgtgtgtgtgtgtgtgtgatgaaagagagagagagagagcctctccaggccctggccagagaccccttggcctcctcctgcctgcttggagaggcaaggtctctctttttcccagggtcgggtgatggagctgttggggagggagccctggcagcctggtccttgtggagtttggttctgcgtgggcagctgtgtgaaccttgaccgcttcagaccagcttcactggggtagccacttcaaagggcccatgaggatgcctgccccagtccccagcccatccaccctcacccacagcccatgccccatgagaggggactgtgcctggaaagggcctctctgggaaatgatgtctacccctccaggatcaaggggtagggcagtcgggttgcagctggggaggagatgaaggcaggaagtatgctaggtcagtgacccaggcaaatatttggcagatcaatgctcaaggttgacctcaagtgtttaccactgggtcaccaggaagtggcttcttgccactttcacccacgcctcccctcatggcagccttcagggatgagggcttttctggctgtggtcaggggctcacctgtccacctagccccctggcctagagcgccctgccttgcccacctaactggaggtggtcttgggacacatcattttttcctcagagtgagtggtcgtcagaggccagatcccaccaggacagcctcctgccctgtgctgagtcctctcctagggaaaggccagcccactcgctctcccctaaacaaccgggagcacaggtaactcgcctctctccaaccgatgaggacgtcccgcgcccaggctcctgagggagggcgtgggaggaaggtgcgagccagacccacatcctctctgctgctggagggggcccttgcaccggctcagaaaggtgcggagcgttgcctgcagccgagagggaaacagcgcctctccgagcactttgttccacttgctggagggctaaaaatacactggcacagccaaaggcagtccttgagagcccaggggagttggcagtggggaatagctatcctagcacctggcactattaaaggagcatcgcaggattagccaaccccctgggccctgcctgcgcccgtcatccccactctgcactcagttcactcttcctgcagcagagtccgggcttccctgcacccctgctccaccctgcccactctttccccaggctggaccatctgtatccctggttggagcctggggctgcctacgtgactgcgcttttgcagatgtcaaaacagcagctctcctgcaaaacgccgagaatgcttccaattcctccagggaagctacaatttgccataaagctgaaaatgaaaatccttttagtgggccacaacccagtttgtgaatttcttaaattcaagaaatgtgcattgacaccctgcttctataggccttaatctttccaggacctcaagcctctgtgagagtctgaagaaagacagggactcagaaaaacaaaatgctcctaagcagcaattgccaagcaattttagggaactggattttagggaaatggataccatgaaccccatccacacatgctcacactccgagttcagaatgcttgatttgctggaagccaggcactgagctagaccctgagatggagagatgaggaagtgggggaactgccgggcacgcaaatgccaccaatgccacgggcatggttaaagagaggtgagaaccaggccctcagggttgcgggggcggggcaggggggaagatgaaccagggtgtaactagaatatggagaaaagggtgcatttgaatggggctttgaaggacaaacgcgatcttactggggagaaaatgtagggttagagaatttgtgtacatagaatttgtgctcctagcagggcatgaaaaagaaaaaacttgtttggaagcagggcagtcctgagggtttgcaggggatacgaaggctgagtggattcatgctctgttgctgtgtaagtctaccacaaactgagaggctaggcacaacacacacttattatctcagcttccgcgggccaggggtccacccagttagggtaggtcctctgctcaggggctctccaggctgcaccaggggtcacagggacctggacaggaaggaatctgcacctgagttcattcaggattttagcaggattcatctcctgtgactctagaactgagagccccaccttcctaccggctggcggctggaagctgccctcagctcctagaagccaccacagttccctgctacgggccttctccatgggcacctcccaacacagctgctgccttttcaaggccggcagaatctctataaagtctgctaagaccgaaccttctatcatataaagagtgatagcccatattcttgcttcttgctaggagcaagtcacaggttttacctgcactcaagaggtggggattctatggggcgtaacagtgaagagtggagctcacagggccatttcaagttctgtcagctgagggaagacttcgctggaaaagaggcttggagagagttatgaatgcccttgcatgccagtttgaaatgtacgggagacagggagccacagaaaggggatgaggagggaaggataggattagaggccaaaagttcaaggggaaggtaatttcttttcttctcttctttttctttttcttttttttttttgccagagtcttgctctgatgcccaggctggagtgtagtggtgcgatcttggctcactgcaacctctgcctcctgggttcaagcgattctcccacctcagcttcctcagtagctgtgattgctggtgcacgccgccatgcccaactaatttttgtatttttagcagagacggggttttgccacgttggtcaggctggtctcaaactcctgacttcagatgatctgcctgccttggcctcccaaagtgctgggattaaaggcgtgagccacagcgcccagcctgaaggtactttttatggttgggaggggaaaggatgaggagccatgggatggtgaagaaagacccagtgtctgcctcgctgacctgcatttcctcttggtctctatgcaagtgtcacctgatcagtaaggctctccctgtccacctgacataaaacaaccgcccacctcctctctcaagccctcacccagccttactgtctcacagcttaccagcacgtgtcataccatgtgtttgcttctttatctgtttattgtctttctgtcccttgtagaatggaaggagtttgttcggctgactgctatatctccagccactagaacagtgcctggggtattgtacctactcaatcaatatttgctaactaaatgaatgaatgaatgtatgtattcaaaagatcttctggcagtagacttgctagaatttcccataattaaaaggtggtagaggaagaagtaagccattagtgatgctctaagctttctgccttgacagattggaaggtgatgctcagtgacatgggaagaaataggtcacagtgggaagcagatctggattgaactttggtctagtggacctgagacatccaggtagcagtcaggtcaggagagcaaggagggtgttagaaatgtgagatccagagctcatggggtaagtaggagagaagggagtagattatgtagtcagtgctaacagggaacagatgaagtcgtggggttcaatgagagagaggagaaccaaggacacatgctgggaaagaagaagccagtctgcgaggtaggaggagactctggggtccccaagaaagagttccaagaagggaggcaggtcctgttcaaactatggagagggcaagcaaacaaggtgagatgtgaaaggatttggtgattagagggtgactagtgaccacagggagagaatctcagagaagtggaggtttccaggtcaatgagaggctgagaaagaaggaacacgaggcagtggcaagaacagattttatggtgagaaagggaggaaggaaggagggagggaagaggatggatccaggagtgggagaaggagattctgggacggacagaagttgctagcctaaataagcagctcagcaaactcaccctgagtatcccctcccctgctgtgccccaccctcctgtcagtgggatgtgggagaaacagaagacagacttgagcatacactcaaggacatctgggtccattgaacctgccccaaccttgggcttgtccgagctaccaagaaaaacttacaaggaggtactcagtgggaacttaggggagccctgggggctactcggttgcacatggcagatcctggttctcactgttgttcaggactggaaccccttacagcctgtggcagatggcattttctaaaaacagccaccacagtatctcccatcccacttgctcttatacaagtgaccttggcacacccctatcgaggggtaaagtcagtgtcccttcatcttgaacctgggcaggcttctgtgacctccttggctggtggagtccaccataaaccatgtcagataacctcatcctcacggctggacaaggccacacagcttctgcaggtttctctctcttggcacatgtgccttcaaagccgtgagccatcatgtaataagttatcccaaagccaccacacacacaggcccatgtggagagaaactgaggccgccagccccagcccctagccccacctgagctcctagaaaatcacatccaggccacagcactcacgatggctacaatctgccttgctctctagggttccccaaggcccagctccccgtccctgctgtgtgctccctgggaaggctagcttcaccgcccccccatacacctgcctgggcccagcagggattaacaaacaggccctgggtacagcgcctcctgagcaggacttaacagtgtctgcacaggtcacctgcccagctcccagctccccacccaccccactccagaaaaatggaaaatccagggaccatcccaggcccagctgcgctccaggaagaaaccaggcatgctgccaagaatgacacaaaatggactttgggccgattgcccaagctggactactgcccccaccttcttaggaagggcactctttccggaaccaaggccatagcctggaacaaaaccagatgtctgtagagcaggacatgccaggtgggaggggttgccggggtgtaggaggcacatacttgatgcctctcgcaccctatcagcccaggcaggcagggtgcggggagggaaggagaccccatgtgtaaggactatcatcattctattactgcaggcagctgactgcttctggaggtggacctctgaggcctctggcattcagccccctcatccctgccttcagcaatggggacaaatcgaggttggggggcacaacaagctatgctctctgaaagcaaaacagataagtacaaatcaggaaagaattgtttcctatcctgtatttgtgttaggatacatgtaatctgtggctgggcacagtggctcctgcctgtaatcccagcacgttgggaggccgaggtgggcggatcacctgagggtcggaagttggagaccagccttaccaacatggagaaaccctgtctactaaaaatacaaaattagccatgcctggtggcacatgcctgtaatcccagctactcgggaagctgaggcaggagaattgcttgaacccgggaggcggaggttgtggtgagccgagatcacaccattgcactccagcctaggcaacaagagcaaaactccaaagaaaaaaaaggatacacgtaatctgtacctctggagcatttaaagtaagacctgctttattgtcttattctcaagttatcttaatagatatttcttgagcacctataatgtgccaagcaccatagatatattttcataaatacatatgtgcatgaatatgcaaaggatgtctctagaatagtggttctcaaccagggctgccagggaatgattgtcaatgtctggaggcatttttagctgtcacaacgaggaaggtgctacaaaaatcgagtggggagagaccagggatgctacaaaacatcctgcaatacacaggacagcccctgcaatacagcaacaacttctctggtccaaagtgtcattcgtactgagattgagaaactctaaaaggatacacaagaaacgtgttcacagtgaacacccccattgcagggactagggggccagtgtgcatgggtatgcaaaatcattagttttccttgtgtgcccttgtgaggaagggcattttgtagagtctcttatgaagtgcatgtattacttgtttttagaaaagaataactgtgacttgactgagccataattatttagtggtcttctcttgattgctgggggaaggaatttaaagaggaggaaaagcaagggcctgccacagtacctgggacccacagtcctgaatccacctagtcttcctctagaccagagtgttcccacctggcaccagcgcatggtgacccagtctgttctttcctgcagggaccatcctatacattggaggatgttcagcagcatcctggcctctccctccccagatgccagtggcaatctcttccccatttcgacaacccaaaatatctccagagatttccgatgtcctatggggagcaaaaacatccctggttgggaaccactgtgctagatttactctgtgaaaatctaaacacaaagaagtccccactcactgacctcagggacctatggctcagctggatcctcaaggagacactgacccgcagacaggccatgccctgggccaaaggactaaggacacggagacagcagacactgcatggagccaagggtagggaagaatgtctcctgcaggaaatgttgcccactgattactgatcatagagaggggcctcttggcctcccctaaaacatctgcccatttctttttttttttttttttttttttgagacagagtctcactctgtcgcccaggctggagtacagtgcagtggcacagtctcggcttactgcaagctccacctcctgggttcacgccagtctcctgtctcagcctcctgagtagctgggactacagacgcccaccaccatgccaagctaattttttgtatttttagtagagacggggtttcaccgtgttagccaggatggtctcaatctcctgaccttgtgatcagcctgcctcggcctcccaaagtgctgggattacaggcgtgagccaccgcgcctggccaacatctgcccatttcacagagaaggaggtggagcagaggagtgatagggcctcagtcacagagtgaatgatggctaggagaagctgggacggctctattccctgtagcatcccaacacgtcctgggagactttccttgttctttatccactccctgactccatggacacccccaagtctcctggtgcctgcttcttgaaagggggtcacctaagatggctcatgactagcgtcgtgtattttctgcatttaccctgtatttctagataaacaatcactccgctgttcccaaacaccgcagtggctgcacactgaggtgtctcctaggggctggaggatcacatccgcagctgcacaccacaggcccaggaaatgtccaccaccattaggctgtgccaccttctgcagctacaggcagctgagacccagggaaacccagtttacaaaactctctgacatctacataagtgagagtggcagggagaaatagcatgagaactaaaacccaccttgtttcaactccttaaggaaggcagctcagggcgagtccagccttgggcaatgaagtcagccaagacattccttccaccaggttagaaaaagtcagatatcaaagaacctaggctttaaagccaaactgcctgggattgtaaccccattctgtgacttcctggctgtgtgatctcagacaagttactcaacctctctgacctctctgagctgagtagctgcatctatacgacagagatgataacactgaccactctatagtatcatcagtcagctgagataatacaagtgaagttcttagcacagagaccagcacattgtaactacatgttacatgattcctgctattattttattattaagcataaatataataacaactaccttactgtggttcatgagctggtatgtggggccccatagaaattttcacaaataaagtccagtttggaggcaacagggctggaaaactatgaaatatctgatcgtttatataacatccctcctcccaccatcccatattgaaaatataaaaggatcttttaaaaacaaattttagtggatcttttaaaaacaaattttaccccatctgaacagctaagacctgactgccctgttcttggtttcagctgttttccagctgcagtgtttttctcgttgatcagagagaaatccccaaggtctggcaaaggaagcctttaattgctctggatggaccgatttttggcttagctgctcaagcatataattgaatgagagggaaagagaatatcactttgagattgctttgagatgaatatacagtcagacatccccgctcctgaccagatctcaaagattctcctagcctgactcccacaagctctgcggacagagaacacgaagcgttcacttcattttcctgaactttatcaaaataataacaagagtgatcataacaatcgttgtcctttatcatatgtgcttgtaggttggaattccccaaaagtgaactctgagacaaggatttgagtccattgactttctttggagggaatcctggaagcacaaggaagaaagacagagaatggaagacagccagggaagcaagttatggctggggccgctggagctcaagccccctggggactctgggagccagtgcagcgcgcacacttcagcatcatctcatccagggatgagggcactggggaatttatgccccagatcccatcagccattggttgagggctgttccaaggctgtattaattccctggcacttccagccatccccactgcaggcagcccaaagaacaggaacctggggcaaaagagccacaagtcaggccttctgcaaaggcaccagcagcatccctccagcacccaaatatgacacaaccccaaaatatgatcattgcccacttctccactcaaaagacccagaggatttgtgacctaattgaatatataatctttttataagtagataaaagagttaaatatctataacatttaatttaccctacatgcttataatcacatattatatgttaatgatatattaatttagaaaagttgctatctctgccctcattccatgactcagttttattccagctcttccaattcatcattgctctcatggtctttgtcatcatcaaagccaccttttgaatcatcttagtttcccaagcacatcttctttcctcccctctgggttcttggcgatacagcatttttggaatctgtaggatgctttcactgaaatttttatcccaagccttgagcacctatttgcataacattagggcagctggctgttccattcatctcagaggtgccaatgcgtgctctccataatgtaaccacggatggtatggctttcttaagtgtccttaaaagactcgctcactctcatagtgcaacactgtgatgccacacccttggaaatttgttccaaatctgggttacatttcctagcttcctttttagcaattccttcaagataaccttagtaaatagccaaaaaaaaaaaaccaccgatcaaggttgtttcagataacatctcgcctaaacagcacttggttgtttaaagtaaaatagttgggagcaccccacaacatgaaagactgtgtgagtctttcttgaaaatagaaagtctcattccagagatcatctggggagcggggagctttggtgagtatccaatcctgatagtggttttgacagtcacatgcataaacccatcttaatcttcacaaccaccccaggaggtgggttctatcattattcccatttaacagatggagaaattgaggcttgagtggctgaataagcagtggtgggtgttacttggggatatgcacaccttcccccaccatgccgccacccctgatgggggagagctgtgcccatgggcgtagctggtagactcctgggccaaccagcaaaccctaaggaacaaaaagccccagctggcccgcagccatggtgaggtcctcactcagttccctccactttcctgagtgaggaaagaaaagggcaacttccacccttcctgctgaaaacctctgcaagaaaatgcaaagaaaattcccctctaagggatctggagctgcttccaaaacccacacccaagaccatttcaaataggaaagcaaaagtgtgcaagagtttttaaaacaagacaaagtggaaaaatcttgactccccctttcttgtctgtcttgctaatcagtccatgacactttgggtatttactgattaacaaaactgaagaattggcgagggctgtgagggagaggattcagcctggtatcatagggagactgtgggctttggtagctggcaggactgagctcactgccttcgggcactctcagcctcagtttcaccatctgtaagatgggtaataatccctacctcgcactgcagtgatggtgatgaagattaagtagaatgcagcagtcaacataagtcagaaatcggtagtgtcaatcccatcctgcaccatccctcctttcctcttctgtttccagacaggttataggagtaggggtgctgcaatgggacagactgggtccctctggagttgggaacgagagttaccataacgaggagtggagacctggacgcctggcttcctgctcttgcctttctcaggcacctcttcccactgggagaagaccacgcgacctgtctgccagaaagccctccaccccaccccagaccaccccagtcctgcctgtggccacacccgtgtgtgggaccctcgtctccccaaggtgaggtgagtggatggaagccccatagctgcagctgcacccctgccttccagaaaccaggtatgggagctaaagtggaggaaaccgagagggagaagacaggtcaacagccccagcaaagagaagacggggtgttctccccgaaagggcccctgaggggcacacgctggaggcatggctgctgaagccccagaccaagccgagggcatcctgggttacactggtgggtctcagagctgctggaaggctgctcctggcctcgcgctcccatctcctcacagctgcgaactgtgaagggttctcaaaagcagggtttcaattttgcaaacagatcttcagaaaagtgtgcctcccagcttcccacggccagccacgtcggcaaaacatacctcgggagaggagtccgctgccaaggaggctgggaaacagcccggaagcccaatgcgcctcgggaggctctgtttccaatcagctggtggccgttccccccaactcgttaccataaccagatttggggtaagtgagcatgccccatttcatgaacagttgtcagagaatccccaaatcctactctctgacaggccacacagaccccccagcgcaggcagcccggtgtcctcaggagaaaaatgagagacttgctcaaggcagcttctctgacctcatccagctcagacgttctctgatttcgtattttccctggacttcctttagaataattccacagggtctagtacactagcccccttagtaatccctcattatgtaaaaaagagaaaagaggaatatgtgaactttctagatatagcactcacacaactcacaatttaaaaaaatttagcaacagggtcttgctctgtcacccaggctggagtgcagtggtgcagtcatagctcacggcagcctcaaactcctgagttcaagtgatccttccacctcagcctcctgagtaactgggaatacaggtgtgcaccaccacagctggctaatttcttaggtattattatttttttgtagagacagagtccaggctggtcttgaactactggcctcaagcaatccttccaccgtggcctcccaaagtgctgggataacaggtgtgagccactacaccccgcccagagtgcacaatttagttgtcaaggaaagatgggtagacagttgttttttggcagccccctttcccctttctattgcctactccccaaaacactgacggatacagggtgccaagccattatattttctaattcaagagttaaataacattaaagaataatttttggaaaaaagacaaaattatgactctcattaaaatataaagattttatttaactcattaattaatgggaagtagttaagatgttctaactggttaaaaggagaattccaagaaccacacacatgtaagtcaacaggaggctgaaatgaacttgcagaggaagtttatccacagggcaaccatcgagtacattccccgggacacaaggaatttgcatttctatgaactcaagtcatttgcactattatcagttctctgtgacttatagagttgtaaatggctcaaaggcaatggaaggcagtgataaactggaagagtgctctaggctggacattcagtgacatttgctcttttttgtccatttgaaagtcttttactaatttttcctgatggtaatataggagaccaaatggtggaagagtcaataaaggctacacttagaggacactgatccctccagattggaatcctgtggaaaattcttggaggagacagaagttgagcttaattttgagggctggtgaagatttggaggctgggagggagcctccaaattattctttaatgttatttaactcttgaattaggtatcacacctgtaataccaccactttgggaggctgaggagggaggatcgcttgagcccaggcattctagaccagtctgggaaacatggtgagagctcgtctctacaaaaaaatatttttttttaattagttgggcatggtgtgcacctgtggtcccagctattctggagactgaagtgggaggatcgcctgagcccaggaggtcaaggtggcagtgagccatgatcatgccactgtactccagcctgagcaacagagcaagaaactttctcaagaaaaaaaaaaaaaatgatatgaagaggagcacatctggctacagaggctacagaggcgagtgtgggcggaagtttggagggaggaaggaaccaggcgtgttctgctggcagggtgcacttttctgcccagaaaagtgggtttgtgaaggaagcaggtgacaaggttggaaatgtaacttgggacatccttgtggctttttactgtggctctcagcttcttaacagtcctggagaaagagaggtaagaggataaataaagatggtgtaaatggtgtgaagatagttatctgaaaaggctgctgggaggtgctggtcttttgttctgttcataggagacaattttgcgtgcctaccttttttgggagtgtgatcccccttcttgctgatgaggaagaagcaaactatcaggtttgagacagatagcccccccacttatgagagggcgacagaatttgaactcaaaaagacccaaccacagtcaggtagtattgacccgggtgtggtattgacctggaagtggtattgacccggaagtggtaagaacatataaaactggagccctggttgttaccacggcaacccgtagtctgttgcatgctgagtttgggggagcagaagagtctcgcggggatagtcagtgcgcagggagactagcacaggccggcagagaagtgacccagccccggattgcctggtaaccttccgttcccaggaggctgctgtgaggctcctctggtaatcagttccctgagtccagggtttcctaataggagcccgtctccctccggttcacttgaagggctctctgcttctttccctcaaacaggcttcatggagtataatggacccacagccatctccttccccaacaccaactctgcctgcattttaggccaggtttgtaggagagttgaatgaagattgaatgaatgaatgatgaaaagtacaaaatgccatcacttcacttctttcaggaagacccaggacactctgctgcatcctccacctgtttgtgaattaaatgtccatgatggcttttactaagcacttactatgtgccaggcactgtgctgagctctgcacctttaagaggcagcaagtcgtgactggttcagagctggctcagagctgcctgagttggaagcctcggataggaaaatggaagcttaaagaggttaagccctggccaagcacagtagctcgtgcctgtaattccagcactttgggaggccaaggcgggaggatcacgtgggcccagaagttcaagactagcctggataacaaagtgaaacctcatttctacaaaaaatttaaaaattagccaggtgtggtggcacacgcctataatcccagctactccggaggctgaagctggaatatcgcctgagcccacaagttcaaggctgcagtgaactatgatcatgccactgcgctccagcctgagtgacagagcaagaccctgtcactaaaaaagttggggaggggggtcaagccctctgctgagctagtaatagtgggactgaggttcaagcccatggctgattccagatcctgtttacagagccgttatgtgacgtaactaaagtgttgattatgcatcgactaggcacaccatgcaaggtgctgcggatgctgctgtcaccaacacacccagtcctggcccacagggggctgccaccccagcccccagtgctctccctggatcctgaatcctagctatcccttcagagccacccctctggcttccaagcacctgcactacccactcccacccctccctggaagggatggcgcagcctgggagccagctgctctggggggctcagacctgtgggctggattgtccatgtgtcagggaaggaaagggaagcccatggcaggagggacaccctcttatgggtggtagcaactccatggagcccaggctgcatcgttcactgaggctgctaatgtttgaacctatctttgaataagatccaccctcttgcactggcaagtccaagctgtagtaaaccctgagggagacccacagtccagctgcaaggccctgccccactcttggccgctggcagaagctccaggcttgccgaggggtgccacgtagcagaggcagtctccgcctctagcccatcccactccttcatctgcttctcgttagcttcaaaagtaaggcctggcgctgtgccctgggcaggagggagagcttggtgtggccgctcagagcttcacctcccttgcctggggtttctcttctcctgccccatccatcgtcagcacagctgactgcttctggggctcctctgtctaccttccccacgttccagcaccccccttcccctgcccctctgtagcaaccgcctccctgcaaagccccacccacccacacactcatacacacacccctctcactcccctggcactcagtccctccaagcttccttccttatccctttagagccctgcagccctcaggcagtgtagcccagaggttcaagggcattcgctctggtatcagaagggtctgggttcaaatcccttgtgcactgcttgctggctgtgtgactttgggcaagttgcctaatctctctggtcctcagtttttgcatctgtaaaatggggatgatattaacagtacctacttcatagggttatcttgaggattaaataaaatagtacaagtaaaggtcccagcataaaatcagggctgatccaccttaggtataaaaaggataaattaggacttggaatcttactcttcctaaggagacctgcagttggctaaaggaggacctgccttcagggacagaaattcaggttttgttttagaataggcctgagggagtaggaagctggaggaacctgtctctatattctggatacctcaaagacagttaaattctgccgtggtgagcatttattgagcactatctgtgtgccaggcactgtgtggggaaaccacaatccctgcagatcaaggagctcagattctagtgccagaaaaaaatgtaaagagaaagggccaccatgccacccactgaagacggcaagggaagaggccagaaagtgctacgaacaaggaggaaacagctccaagttgttgggcagtcgggcgctgggtctcaaaggagggccacttgcatggacagaaggtacccctcttactgagcactgggggcctggtgggtcccctgtgctctccaggagaagcaggcagaattcctaagccccgttaggccaatgaggaagttgaggcaccgagagtaaggggcatctgcttccccaccagctgacttctattctagaaaggaatgttctgcacaaccccaaaccgtcagctctttctgcttgcaaacttggcaggagtttgcagggaacacaaagaagagagggggaggagcaaggtggatcagccgggctggcttgcccagggcctggcacagaggatggactttgtcccacgtgggtgaggggcgttcacacacaggcgtccacacccccacgttgctccaccaggcagaaggccagattttgtccttgtaattcccagaactgccctgaaacaggactgctcactactgtgcatggtttaaaatgcagtggggggttttggggagttttttcgtttgttttgatacggggtctcactctgtcacccaggctggagtacagtggcatgatcatggctcaccacagcctcaacctcccgggctcaggtgatcctcccatctcagcatcccgagtagctgagactataggcacttgccaccatgccaggctgattttttccatgttttttgtaaagacagggttttaccatattgcccaggctgatccacccaccttagcctcccaaagttctgagattacaggcatgaaccacggtacctggccaaacatgcagtagttttaaaagaagcctgctcagggagaggagaaatgagtcctgtcagatctgctccccctggagaatggcttcctcaccagcccagcccctgtctgtgcccagggggaagcaggcatgaggaggaccaagggggcactgccatgtactggccccgagtaagccaggcaggccctctgctgggatcctcacagatgtcagtctcctcgatccttaaaatcagagctctggagtcagtctcttgacagcaagccaagtggaacgcctgtgtctgagcagtagggcagagaccccgctctgcctgagcagcggagacatctcagatctcgcggttgcagaggatctgcttccccctcagatgcctgcagggggaaagaagcggaggcagggggaaagaagcggaggcagggggttgtcctggctcactctgagcccgcctggcctgggtagcaggaacaggaactccatagtggggacgaggttagagaggaggtgctagccggctgcagcccctcacaggcagggcagccagttacatctgaattacagataaaccagaaatacttgtagtttaagcatggcccaaggactagggcagtggcagtgggggtaaagaaggggagaggtttaagattgtatttgaaggaactgaaatcaggatcttgaagagatgatatctgcgcacccaggttcattgcggtgttactcacaaatggccaagatctggaaacaacctaaatgtccgtcagtggaaaaatggataaagaaattgtagtatacacctatgagggaatattattcgacatttaaaaagaaggaaatccagggccagggtggttggtcacacctgtaatcccagcactttgggaggccaaggcaggagaatcaatcacttgaaaccagaagtttgagaccagcctgggcaacaaagcaagatcctgtctctacaaaaaatttaaaaattagccgggtatcatggcgcatgcctgtagtttgaactgctcaagaggatgaggcaggaggatcacttgagcccaggagctggaggctgccctgagctatgacagcactgttgcattccagcctgggcaacagagcgagacccggtatctaaaaaagagaaagaaagaagaaaggagggaaggaaggaagggagagagggatcaatcctgccatttgtgacaacatggatggacctggaggacatgatgagatcctgaagtaactcagacagagaaaatcaaatactgctctttctctcttatacatggaacggaaaacagccaaactcatagaagcagaaagtagaatgatgattgccagggactgggaagagggggaaacagagtgatgttggtcaaagggtacaatgtctcagttacgcaggatgaatacattctggagatctactgtacaactagggcctgtgattaacaatactgtactgtacacttacacatttgctaacagagtagatctcatgtttagtcctcttaccacataaggaaatgaaaaagaaacagaggagacggaaggacacttagagtgatggataagtttatggccttgatgaatgttttcgcaggtgtgtacatatctccatccatcaagttgtatacattaaatatctacaggctgggcgtggtggctcatgcctgtaatcccagcactttgggaggccatggcgggtggatcacttgaggtcaggagtttgagaccacctgggcaacatggtaaaaccccatctctactaaaaatgcaaaaattagccaggcatggtggctcatgcctgtaatcccagctactcgggaggctgaggtatgagaatcatttgaacctgggaggtggaggttgcagcaagccgagatcacaccactgcactccagcctgggagacagagcaaagttccgtctcaaaacaaacaaaaaaaaaacctacagctttttgtgtgtcaatcatacctccacactatggtttaaaaaaagcatgtgatttggagatggatgctctgtggattggtaataagttagatgtaggagacaaggacatgggagaaatcaagaacaacccccaggcttcaggcttgagctacctctgggttcatgggaccacttactggggatgggagggcagggcaggatcagactagagaggggaaccaaggcttctgtttctggtgctgttaaatttgggaggattatttgagcctgaagtggagattatggttatccaagcctggagattccggaattaagggaaggtctggctgtggcgttaccagcacctgggtggaatttaaagccatggttctggatgcaaccttgtaggaagtgagagttcagagagcagagacaactgtccagagctagaccttgaagactcctcaacgctgaaggtcaccgagaggagggacagccaaggaaactgagtcgcagcagccgtggaggcaggcgggtgagcacagagggcaacagaggggaggtttctctgagcagcgggggtggccgcgttggatgttactaggaggactgataagatgggaaggggcagccaaagccagcctgcagtgaattgaagggggaacatgaggagaggaagccgaggcagccaacgtacccaccaccgtcaggaagccctgcagtgctggctggggcagggggcagattgagtagaggccaccggagggccagtaagattgggcaggtcttcatcggtgacctttggatgggttccctgcctggaaacatagagacaaatcctgactgcccttgaattggcagtgggacctcaggcaaattgagttgagtgagagatagtatataagggtgttttaatgtgtgctgagtgatacagagtgggagggatgaacaccccatggtaggtacatgcacacagggggaccccgctcagcaacagcaggggacaagctactgaaacccacagcaacgaggacagatttcagaatcgctacagggagggaaagaagccagaattcagaagggcacctgcagtacaaatcatttctaagaagttttagaacaggaaacactcatctataatgaaataaaaacctgaacaggggttgccgcagggggcagtgtgggggtggcctgactggcaagggacacgaaggaaccttctgaggggacgggaacatccttcccttgggaggagtctgatttaacagatgtctgcatttgtcacaatccagcaaatggtgcacttaagattggaacatttcactctatgtaaattttacctaaaatgaactataaaggcattcctgaatgctacttaatgatatacatgtggagacctttgggagtgaagtgtactgaggtttgtggctccccttgaaaggtggaaaacaataagatgaagtaatgggtagatgcagagctgtgtgatgaagagatacagtaaaatgccatctagggggtacatatgtgggtgttcactggaaaatgcattcaacttttctgtgtgtttgaaaatctttataataaaatgttgaggggaaatttaaaaaaaaggatgtgaaactacttttcttttctttttttttttttttttttgagacagagtttcgctctttgttgcccaggctggagtgcagtggtgtgatctcggctcactaaaacctccgcctcctgggttcaagagattctcctgtctcagcttcccaagtagctgggattacaggcacccaccaccacacccggctaatttttgtatttttagtagagacagggtttcaccatgttggccaggctggtcttgaactcctgacgtcaggtgatctgtccacctcggcctcccaaagtgctgggtttacaggtgtgagccgctgcgcctggccaagaagacttttcatccaatgcaaagatacttgttgggcacctgccattatgtcaggtgctgcaaggcaggggacgcagtgctgatggagatgtccaaagctatggcacgaggcatcatccaagtgacaggcaactgagccagctcctcagagcagagcgctgtcgttgtcccttctcagagaggacacccagggccagaggcaaaggaggaaagcacaagtgggtctgctaggaactaatttaaagaagcaagtcagctgggctcggtggctcacacctatactcccagcgctttgggaggccaaggcaggaggatcacgagcccaggcattcaaggccagcctgagcagcatggcaagaccctatctctacaaacaaaaattaaaaaaaaaaaaaaaaaaaagaacaagtctctggggcctgtgcaaagggcagcagggtgactgggtccccggagatttgggttgggatattcaacacgtgcctcggagaatgaaaatacagtcaggtttgggaacaaccacttcaaccccaggggttgaaatatgcccccatctaactgcccactgctcggggcttctgaacgtttcagcccctccgttataaacaagggaacaggaaacccaggattgccctccccaccaaaggtgtatctgtaggaatgttcaccatagccttgttttttgtttgtttgtttttttgagacagagtctctctctgtcacccaggctggagtgcagtggcacaatctcggctcactaaaacctctgtctctcaggttcaagcgattctccagcctcagcctcctgagtagctgggattacaggtgcctgccacgacacttgactaatttttgtatttttagtagagatggggttttgccatcttggccaggctggtctcgaactcctgacctcaggtgatatgcctgtctcagcctctcacagtgctaggattacaggcatgagccaccgcgcccagaccccatggccttgtttttaagagtgaacatgtggcagccgctgccacatgcagctacaggggactgggtcagtcatttatgatggtttaaagtgcaatggaactccatgcaactgtcagaattagtgaaataaatctataggtcctggaccttgaactgcccaaaacttaatatattgttaaatatatatacacacacagacatataatatgtacattatgatcccatttacataaaactatatgtaggtaaatgtgtgtagatacatatatataggtgtgaatataaatatatataaatacacacgcacacacagagcaccataataaagttcaccaaaatgctaataacagtgatctcttcataatggaatttgaatcattttttcttcactttcttcttggtatttttctacattgtttaaaatttcacaataagtgtatataattttaatgaagcaattatttttaaaaaaaataattgtgcaggaggtttcagagtaagttgatgtccacaaagtgcttaagagactgtcactttggccgggcgcagtggctcacgtctgtaatcccagcactttgggaggacaaggccggaggatcacctgaggtcaggagtttgagaccagcctggccaacatggtgaaaccccatctctactaaaaatacaaaaattagccgggcatggtggcgagcacctgtaatcttagctactcaggagactcaggcaggaaaattgcttgaacccgggtggtggaggttacaatgagccgagatcgcaccattgcactccagcctgggcaacaagagcgagactctgtctcaaaaaaaaagagagactgtcacttagcccccgccatggtggtggaggcctgagtcagggagaggttggggaggtgggctaaggactctctcgagctatgactgagagctctcctgtcccctccctgagccctgaggcaggactggctatatttttgtggggttcagtgcaaaatgaaaatgtgggccccttgttcaaaaggtattaagaattccaagatagtgacagcagagtacgaagccaagtgcaagggctcatctgggcatgggacaccatgtgactccacaggttacaagcccatgaggctggccctgcctggcaggaccatgtgagcaaattacagagcaggggatgaggccaggaaaatggtcaaggaggagctggtctgggccttaagatgccatggacccacacagaccctttcagttgaccaggaatcttgccagaacaaaccttataaacattcatgcttgtgcatttgaaaccgtggctcctgagatgttaaaagcccaacggcaggttccaagggccctgagtcattgggcagctttaattagcaagaattagagtcaggaggggcttaagctcaggccaggcaggtgggcctggagggctgcttgtaggaggtggcctctgcctgctgtgtggaatcccggggctggccagagggaacctcctccaggaaccttccacccccagcccccggaagctgctggtgccccttggcccagcctgctaccttcccccaagtctctgttggggcggtcaccccaacacgtcacaacgtggctgctcctggggaaacctgctcctgcgccacccaccaccatgtcccacccccgcacctcctggttcctgggcaccacaaagagagcctgtgttgaggcccagccgcgctgagcgtgcagacagcctacacctcccgtaggccacacggcacaaaggctggtctgtgtggcctggcctggagggcccaccgcctcccttcctccaccaggcactaggatcaagtcatcaaaggtcccaggaggctgccaggctggctggacagccgaggagacaagagctgctcagctgaccctgccagactccagtgtgtccagcaagcagcagccacttccaggctcacgggcactcactggtgacatgtgcacagcctccagcctctctgaaggctccttacccctctaagttcagctgaagggcttattcaggctctcccctaatcagggcccctgccaccagcctttccccaccctgcaacccaccagtgatgggtacaaagacgtgccatcactcccactatctgtagaacagcccagaactgatgagggtttaatgctgtccacagcaaacctcaccaataagagtttggcttatgtcctcagatgattctaacagaatggagtccaggcgcccacactagcaacaggcttttaatgcagccactgttggctccccgtctcctgtcccccttccccctcccctcccttgtgcctcggaatcacctgacacataaacctcctgcgcccagatccttgtctcagaactgccattccaagtctctcccagccttgatctcacccccctgcttcactcatatggctcatgcctgtaatcccagcgctttggcagactgaggcagaagaaccacttgagcccaggcattcgacaccagcctagacaacatcgcgagaccctgtctctacaataaaatagacaaattaaccaggtgcagtggcatacacctgtagtcccagttaatcaggaggctgaggcagaggatcactcaagcacaggagttcaaggctgcagtgagctatgactgtgccactgcactccagcttggctgacagagcaagaccctgtctctaaaaataaatgaataaataatcatagctgcaacacacatgcatcccatgcctgttaggagtgtgtggagggggagtttgggtgaggggagatccctgcaagggcccctgctgcccttttcctccgtgggtttcattttatgggaaaagagaaagaaagtagaatctatggagacaaaaaaatgggagaaaggggcaaggggagggagaaggggtatgtggcatagagggacaccacctccaggggacaagccaggaggacgcctcccttggggcagcccctccctctctccactcagctgcttctccaggaagcccctttatccacacagggctcccctaagtcctgctcacaaaggcatttaggactcagctggactccgcagggtgagtagtgtgctggttagggtatttccatcgcttcccgaacattccctgcctggccctgccccctggaaggctgagccctagggactgcactgtctgggatccctggtcctccacttcctggttaatccagccaatagcctacagtggcaggagatgggggttgtggggggtggggcagtggggaggcaaagtgtagaatatttatcccccacattcttctctccctccctccccatggttctggcaggggcttcagtcggtggccctcctccacgctgcccttctccccagcagctggaaacactcttccatggccttccactggagggcataacagctccccactgctgctagtgcctgcgtgcctcaacatcccttgtttccctaaactcagaccaggagcagaccctccattaagaaaatctcttttgaaatcccttgaggtaccacggttttctgttgatgccctaacagagtcaggtgcctcagagtcacctccaagtaactcctggaagcccctggctccagcaacgtggcaaatatcagtattcagctcagatgacctgggttcgaatctgaacttcaccatttacttccaagttgcgtggcttctctcagcctttgtttctgcatctggaaaatgggcgtgatcacagcagtgctaaatgtctcagaattctcaatgtggcaaataactgaccccacttcaggccagcccaggagacaaagagggatttaccgaagggctgtgggacccctgataagaacaacggactccatgcaggttctcacgactggttctctctgtctctaggtatctgcttctctcccttgtccctgctctctgctatacctcacatgtgaggtatacggctcccctccagctcatgagtttacatgctctaaatagatacagactccattctcccttccacaaaggcaagctcatacttgcatactgtaccacaacccacttctatccactcatcctcaggaacctcttcccgtccctgaataccttctacactgagggatgacagcgtcccggtgagcagccacgaaaaatccactggacgttccatcaatatttatcttattgacttgtgtcttttcttagtaactatcagtggattccggaatgcattcccctcttcagaaccctatctcaggacccctttgaaagcagggaacttgccatcctactgtcctgatttctttcctccagcccccaacccttgatctggctttcatgtaaggctcacagtagtgaaaacagcagcagacctggtgccgtctctctccagtcctgttgtaacttactctgagctttccggggctatcgcccttggggatgaaaccatcttcaatttggtccagcagctgtgacttttaaaactcagttgagtcttgcactgaagaaagacacaaagctacccttctcctcttctccaaaggtcagctctggtttttaaagttcaaacaatagcaattcaattgaacacacagatcctaaatctttcctgaggccttcaaaagagaaagagaacaccacagagcttttaaaaatattgtacaaaatcaaattttgaatatcacatcttccagggtccctggagatgcagatggcacactcagactgggcagtttgaggggagtttaataaagagactatttacaaaggcacagataggatttaggaaatcagtgcaggctaattcagaattctgtggccagcaacatcaggggacgattcctaaaagtgaagaagtaattacaggaagccaagagggtagtggcaatgagagctccctggacagaagccaggacctttaggaagaggaagtacatgacccacagggaatccgaaaggaagggctggggaggtggatacccagactccctcccctcctgtcttccacacactatcccgtggagtgaacccagctggaaactagacatcatgggagcccactgctccaggctccagagccctgcatcccaggacacagagcagacagggaacaggcaaggctgggaggggagcagggaggagaagcaaaccgaagcaagcccagtgcagatgctttgagagtttacaacccaattagaaagtacgaatttagtgcagaaattggggagcaattacatgcacagctaaatgatttttttgttgttttataaatattttcaacaagttccctttaaaaagcaaatgtccccctgcaattaaaatatgatttcacttacaggaaattctactcactcagagctgttccagaccccagacattcaggtaaataaaggtatggagcaagcttgtgttggctttgagtcaattgcatctcccacagacatcccctccagcaacctccttgatgacgttcaagccagggagaggacaaatagttccccaaaagaaaattggagggctgctggaaggggaaagatgcaccggaaggccacagaatgccagacagccattccacgaagacacgcattaactcacaaaggtcataccatctgtaagtggctaagctcaggtggaaattccagcctgtcctccccaatggccttcacaaatattccagagggccttccacatggaactatgatctgtaagccctggttcagcagggtccttctttccaagagaggttcttttctgggcactcccatcaggaacacccaggtctacccacgtgtgccttctgtcttgggggacctggtagttggcaagtatcttccaagggaggtccttctttggggatttttctgtgctctccgcgtcctggctgtgagacatcgtggcagagtagtacttcactgatactaattccaggtatgacaccaagaagcccagccccagggcccagtggtggagggtgggattctgctcaactgcaaggcccaagcccatccccagtcccctgccagcagacaaatggctggacccacacatagcactctctgctcctgggacaggatgtcagccagcgctctgctggatacaagatctcaaagacagacatcagggaaacagagagagacccacatgactgtttcaaacaagtcatgctcaaaccttcttcttctaattcctaatgtacccctctcttctcacctgatgctaagcagtaacggtgccttcataaactcggaaaaggaatcaggaaagcaccaccctggcctgagcaataacaaagtgcatgaaggtcagaagccgctgtgtttttaagaggctgttttatttatttatttatttagagacagagtcttgccctgtcacccaggctggagtgcagtggtatgatcttggctcaccgcaacctctgcctcccggattcaagcgattctcctgcctcagcctcctgagtagctgggattacaggcacatgccaccgcacccagctaatttttgtatttttattagaaacagggtttcaccatgttggccagcgttgtcttgaactcctggccacaagtgatccgcccacctcggcctcccaaactggtaggattataggtgtgagccagcgcgcccagccagaagctgtttttaataactgaccttttcagacaaatcccagcaaactttctcccttagcaccatctctgaggccacggtgggtggggtgtgtcaccacgcctctctgtaacacctcctgtgccctcttgaaatggttattgtttcctgagtggtggctgtggacttgtggcctcgttaagtcatattatctcaatggaagccattgtctcctgctggaggctccacggctcctgtcttcataatgcaacaccctgaccctgaagtcttgctctgtggagactgtaacaagatcctggcagggctcaaaggaaacctttcttctctcccagcacatgcagaagtcccactggcagggccaaggcatggagctctccatcccggaactggggcttgaacttggccaacctgagttggggcagatcataccctccagctctggtctgtcctgattttcttctggccacagcacatcccctcccactgttcctgtggcagccagccttccagatgcaccccacctcctggcaatcctgccctcatgtagtcccctcccacattaaatagggctgacctgtgttaccagttgtggaaatgacagactgtgaccaggtcatcatagatattgcggcttccatcttgctctctcttgaatcactcacgatggcgagagtcagctgccatgttgtgaggctgcttaagcagccctgtgcaggcgtccagaaggtgaaaaactgaggcctcctgccaacagccacacgaactcatcatccgtggtgggaagccatctccagccccagccacgccttcaggtgactacaaacccagctgcatcttgatgccaacctcatgagtcagaagccactcctggattcccaacccacagaaactgtgagacattaaatgattattgttgctttaggccactatgttttgttccacgggatgatttgttccacagcattagctagctaatattcgtccagagaggtcagcctcctggggtcagagtagaggaggtcagagaatgaacacggaggggcagacaatgcagagtcagaacacttggtttcctgatcccatattgtcctgctacacattttcaaaaaggggaggggtattaaaaatgaagcaaagtagttcagtatgcttcaaccagccgtgatcaccctgggaccatctgcttctatgaactggacactatcgtcccatagtgccccaaattaggttccccttacaaaaacagcaccacgctggtggcgactgaaaccctgagcttcttttcacacacaccgcccagaccgcccagacctcctcaactggttctatgcttggacaccagatttctctttaaaacctaactttctctgatatcaattgatcttggccttactccaaagttccaatctatcgaaatcactttcatctcccatttggctgtcactttcactgttccctccaatatgtgtcacctgcacatctgaccctgtactttctgccatcttcatccagaaagtggactgaacgttgattggctagggcagagctcaccacagagccctttggtactccatgaccaccagggcaacggactccttgatggcaaacactttgctgatagacgtgcaatctgccataaatcccaccaaaaaacaccgtcattaccagtgagtttgccaatcctttattaaaatgccggctgggggtggtggcctatgcctgtagtcccagctactcaggaggctgagactggatcactggggcccaggtgttcgagattggcataaacaacatagcaagaccctgtctcacaaaaaaacaaaaaacaaaaaacaaaaaaaaacagtaacataaaatgctggctggacacaaatttatttaccccattatccagtactgtctaaaaagaaagttggtttgtgtattcgttgcctgtggttgctataattaccatgaacttttggtcttaaaacaacagaaatttattacctcacagtcctggagaccagaagtctgaaatcagtgccaccaaactgaaatcaatccatcagtggggctgtgctccctctggaggctttaggagagaaactgttccttgcctcttccagcttctgggagctacagcattccttggcttatggccacatcactctaattctcacatccagtgtcttcaaatccttctcttctctgtcttcacatggctttcttctctgagtgtgagtcaagtctaactctgtcttatatggacacttgtgatggcatttagggcccacaggagagtccaggataatctcttatctcaagattcttactcacttctgcaaagacccatttttcttacagggtaacatttataggctccaagggttaggacctgatatctctagggggccattatgccacccaccacagctgggcacagctcatccccaccaaactctcccacctcaccatcactgcattttttttccctgctgttcacaaatgagtttatgtcacgctctgctctataattttccaaaagtcaacatcaaggttactgtctctacattttggaatctgcttgagacctgtaattcacccagccacatcagtctggacattaaaaagaggtcataataaacaaaaatagcatttcttaggtttgccattattgctggctctccagtcccttagaaacgtcaagaattctcagaatgtgttctcaagtggaggcagcatagaggttgcaatcagcttctcaagtcagactgcctgggtctgaatactgcctctgtcactatggccaactgtgtcttccaaagatggccacaaaaatctctcccttcccacatgctcttctgcagcatggccttgccccatcccaccagggggtccatttcttcaccccgctctaaaatgcatatggcacaagtgacactgccatttaaagacaaggcccttaacagttgcctgttcctgtctcttggaatgtttgttcttgagactctacgctcagaactcagccaccatgttgtgaggaagccctcaccacatgaagagaccccttgcagaagttctggcagactgcctcagctgagcttcctgccatcaatggccagtgtgcaagtgagccactgtgggcctccagcccagtcgagccttcagaccctccagccccagccaacacctgactgcagccatggcagaccccaagtgaaagccacccagctgagcccagccaattcacagaagcagaagtaattgcgaagtgttgttttaagccactggatttggggacagctcattttacagcaatagatattcagaagagccacttattgactgagtaacctgaagcaagtgacaagcttaagcttaggttcctgccagaagcacataccgagacaaaggcttggagcatatagtttatttgggtgatgaatccaggaaatacaggtaggggattaaaactaaaactactgcatgatccagcaatcccatttctaagtatataactaaaagaattaaaaataggattttgaagagatatttccatacctatgttcactgcagcattattcacaatagtcacaaggtggaagcaaactaaatatccatcaacaggtcaggtgtggtggctcacacctgtaattccagcattttgggaagccaaggctggaggatcactctagctcaggaattggagatcagcctgggcaatacagtgagacctcatctctatttttacaaaaataacaattaaatgtttaaaaaagtaaatatcagccaggcatggtggctcacacctgtaatcccagcactttgagaggccgaggtgggtggatcatctgaggtcaggagttcaagaccagtctggccaacacagtgaaaccccatctctactaaacatacaaacaattggctgggtgtggtggcgggtgcctgtaatcccagctgcttgaaaggctgaggcaggagaattgcttgaacctggaggtggaggttgcagtgagctaatatggcgctattgcactccagcctaggcaacaagagcaaaactccgtctcaaacaaaaaacaagaaacaaacaaacaaaaaatatccatcaacaaaaactattagaattgataaattcagtaaagttgcaggatacaaaaaaaacatacaaaaatcagtagcatttctatatgccaacagcaaacaatctgtaaaagaaatccagaaagtaattccatttacaatagttaccaatgaaataaaatacctaggaaataacttaaccaaagaagtgaaagagctctacaatgaaaactacaaaatcttaatgaaagaaattgaagacaccaaaaaatgaaaagatattacatgttcatgaattgaaataaccaatattgtcaaaatgttcatactatcccaagcaatctatagattcaatacaatccctatcaaaataacaatgacattcttcacagaaatagaaaaaaaaatcctaaaatatatatggaaccacaaagacccagagtatccaaagatatcctcagcaaaaagaacaaaactggaggaatcacataacctgacttccagttatattacagagctatagtaaccaaaacagcacagcactggcataaaaactgacacgtagaccaacagaaaacaatggagaacccaggaaaaaacccatacatctacagtgaactcattttttacaaaggtaccaagaacatacattgaggaaaggacagtctcttcaataaatagtgctgggaaaactggatatccatatgcagaagaatgaaactagacccctatctcttgccatatacaacaatcaaatcaaaacgtattaaagacttaaatctaagacctgaaactatgacactattaaaagaaaacattgggaaaaaatctctccaggactttggactgagcaaagatttcttgaataataccccacaagcacagacaactaaagcaaacatggacaaaccacatcaagttaaaaagcttctgcacagcaaaggaaacaatcaacaaaataaagaaacaacccacagaataggagaaaatatctgcaaactatccatctggcaaagaattaatagccaggacatataaggagctcaaaccagtctatagaaaaaaatctaataatccaaccaaaaatgggcaaaagatctgaatagacatttctcaaaagaaaacatacagatggcaaacaggcatattgaaaggtgctcaacattatcggtcatcagagagatgcaaatcaaaactacaatgagaggtcatctcaccccagttaaaatggcttttgtcttttggacaggcaataacaaatgctgtcaaggatgtggagaaaagggaacccttgtacactgttggtgggaatgtaaattagtacagccactagggagaacagcttggaggttcctcaaaaaactaaaaatagaactaccatatgatccagcaattccactgctaaaaatatacccccaaaaaaggaaatcagcataatgaaaggatatctgcacttccatgtttgttgcagctctgttcacaatagccaagatttggaagccacctaagtgtccatcaacagatgattggataaagaaaatgtggtacatatacacaatggagtaccattctgccataaaaaagaatgagatcctgtcatttgcaacaacatgaacggaactggaggttcttatgttaagtgaaacaagccatgcacagaaagacaaacttcacatgtcctcacttatttgtgggagctaaatattacaacaattgaactcatggtgatagagagtaaaaggatggttaccagaggctgggaagggtagtggggtgggggtagagtggggatggttaacggatacaaaaatatagttagatagaataaataagatctaatatttgatagcacaacaaactgacagcagtcaacaatagtatattatacatttaaagacaactaagagtataactggattgtttgtaacacaaagaaaggataaatgctggctggatgcagtggctcatgcctgtaatcccagcactttgggaggctgaggcgggtggatcatgaggtcaggtgttcaagaccagcctggccaacatagtgaaaccacatctctactaaaaatacaaaaaaaaaaaagggaaattcagatacacgttacaacatggacgaatcttgaggacattatgctcagtgaaataagccagtcacagaaggacacatactgcatacaaggtacctaaagtgtcaaattcacagacagaaagtagaatgtggttgccagggcctgcagagagagggaatggggagttatttaatgggtatagagtttcagttttgcaagatgaaaagttctattacacaacaaggtgcaaacagttaatactactgtactatacacttataaatggttcagatggtaaattttatgctatgtgttttttttactacaattaaaaataaaattgtctcatcaaggagcaagcaccctggggttttcatacaactcccatccctcgcccaccagctgagaatcactcttgaggtgttaactccccacactccaagggccatagagcatgccctgtagagagatacagggagccacaggcacacatggaatggtctgaggtcacctcccagtgcccgggagacattggggcactgaccacatctgccatatcatttacctttgagtcctctgtaaaacaggaatgataaatacctacctcgatagaccagttgcaaaggctactttgaacatacgcagacttagacttaacacagtgcctggcccacagttaaaatgttataatcaggctgggtggtgtgatggctcccacctgtaatcctaacactttgggaggctgaggtaggagagttgcttgagcccaggagttcgagaccagcctggtcaacatagcaagaccccatctctacaaaactttttaaaattagctggatgttcatctgagatgtgaggatctgaaaaaaaaaattagtctgatgggctggcccacgcctatagtcccagctgcttgggaggctgaagcaggagaatccctggaaccctggaggttgaggctgcagtgagctatgatggtgccactgcattccaacctgggtgacagagtgagattctgtctctaaataaataaataatttaaaaattagtggggtggctgggtgcagtggctaacacctgtaatcccagcactttgggaggccgagacaggcggatcacctgaggtcgggagttcaaaaccagcctgaccaacatggagaaaccccgtctttactaaaaatataaaattagccgggagtggtggcacatgcctgtaatcccagctactcgggaggccgagaggcaggagaatcgcttgaacctgggaggcagaggttgcagtaagctgagatcccgccattgcactccagcctgggcaacaagagcgaaactccgtctcaaaaaaaaaaaaaaaaaattagcagggcatggtggcacacacctgtagtcccagttacttgggaagctgaagtgggaggatcccctgagcccaggagttccaggctgcagtgagctatgaacaagccactgcactcactccagcctgggcaacacagcaaggctgtctcttaaaacaaacaaaaagactataatcattgtacacatctgccttgtctattggcaggaacagcgccaggacggcaggggaagagctccgtttccctccctgctctggctccctttaaaggtggctgcctctcagcctcctggcccacccggccttcagggccacaggcctcaagccagctggacacctcacaccggacagctctgccctgggaatcctggaaccccctgctagtaggcgccacgacccaggtcgaggaatgccctcagcacagagactgtcccctggggcagctcgccctactgcctgataagggcggctccttcgcggctcccagactctggagcctgcgggctgggctgcagccaaacgcagacacccctctaatgccgacagcctggcccccttaccctgtagctctccgccctcaggatgcattcttccccagaagctccctgcccacccccacctggaaggcctccctcgtctgaatcagggcgcacacagctgagtctccagcgcggacaccccgtcaccccaacacccttctcctccccccgaacaaccgcttacgatttttagaaatcagtaaaatacatgcccagctccaaacttttggaagcgcctcagagttttgcagagcatagcagtggttctgggctccccagtgcaccccagacttggctccctcctgcccagcccacagccgcgtcccgagagtgaaggggaagcacaggcagccctttccgccgcccccgctggcatgacatcaccttccccacgccgagaagctgaagtctttctcattttgtttcatgctccaagcgcagctttaaaaacctttcctggaggtggggagggaaaatacccaaaatattagccgtggctacagctgggtgtaggatgcagggagttactgtttccttctttatacgtttgtattttccacaatgaccacattctattttttattgtcaggaaaacgaatgagtgttttttaagtaagcaatttagaagcctatttggttgccttcagcatttttcagggcctcagctcgtttctggagccagcttttcagccgctcttctctccgttctctcgctctctgagtggagttctctgccttccaccctttgcttctgtcctttgaaaatgtgagcgaagcacagttgcttgtgcaaaccacaccagcctcctgagatcctctcgattttccttctcactgggaatatttttcatcagaatttattctcccaaactaagaaagggacctcatgtccccgctcatctgatgcactgagaacacagcatcattttcccagtattcttgccaagaatacacaacctgaggcttatcatgaggaaacatcaggcagacccaaactgaaggacattctacaagaaaactgcgtggactcttcaaaaatgtcaaggtcaggaaagacaaagaaagcccaaggaactgtcgccgattggaggagattagagacagggcaaccaactgcagcacgtgatctgggatattgtgttgctataaaggacattactgggacagttggtgacatctaaatctgaatacggtctgtagattagctaattgtattgaatcagtgttcgtttcctgacttagtcactgcactgtggctgtgtagcagaatgtcctttactttttaggaattatacactgaagctttgggagatagagggcatcacatctgcaatttactctcttatgattcagaaaaatatatatatttgtacacacagacagagaaaacagtaaggcaaatgtggcaaaaatgttaatatttggggaatcttgatgaagagtttaaaaaaaaatccttttgttctgttcttagaatttttctgtaagtccctttgcttctgacctctgggttaatgcagttgacacaacagcctgactcctaggctgactgctgactaattctttgcttgatgctcttgaccttggactgtgtcctcccccgatttagcccctgtagagacagtgagcaggaagactagtttggtgaataataaatccgctgtcactgccaccatcaccaccaacaggggcagagggacttttgctgagcactcactatgtaagtcaatgctcccataccctgagtgatgtacacagtacttcactcagtcctcacagtagtcttctgaggttgccattacaatccccaatctacagataaagaaactgaggctcagagagatgaactcacttacctaacgtcacagcagctattaagtggcaaggccagaattgacccacaaatctctagaaccccacagtcttacactaatctgccctgacactggtaaggagactgactggctgtactctgttctgatattttctctcctgattctcctttgctgaaataatagaaacaaaaataattgtaccagccataaaaaaatgaaatcctgtcattttcaacaacatggatgaacttggaggacatcatattaagtgaaataagccagacacagagagacaaatactgcatgatctcactcatatgtggaatctaaaaaaaaaaaaaaaaaaaattgatctcatagaagaagagtcagagagtccaacagtggttaccagagcctgggaagggcaggggagaggggaggatggggagaggtcggtcaacaggtacaaattacaattagatgggaggcataaattctggggttctgttacacagtagggtggctatggttaacagtaagatattgtatattacaaaatagctagaggagaggcttttgaatgttctcaccacaagggaatgataaatgcctaaggtgattgacatgctaactaccctaatttgaccattatacaatatatgtattaaaatatcaaactgcaccccatacctatgtacaatgataatgtgtcaattaaactaattaattttaaaaaattattataaagctatgctgctccatagagtgaccacatgtagctgtttaaatttaataaggctgggcatgatggctcatgcctgttatcccagcactttggcaaatcaaagcagagaattgcctgaggccatgtgttcaagaccaatctgggcaacacagtgagatccatccctagaaaaaataattttaaaatgagctgggtgtggtgatgcttgcctatagtcctagcttgactgggagtttgaggctgcagtgagctatggcatgccactgcactccagcctgggcaaccaagctgagctctgtctctaaaaattaatcagttaattaattaattaattagaattaagtaaaatctgaaattcagttcctcagtctcactagccacatttcaactgctgattagctccatgtggcttgtggctacaattattggacagagcagattgtaaaacatttctaacacggcaaaaagttctattggacaatgccgttccaaaaacttttacatgtgttcatgaagatacaaaaaatgaaaaataaacaaaaaaaaatttacatacccttcactgaccaagataattttttattcaaagttaacttatttttaagataaaacttcaaacacaaaattgacttcaacactgttctcacttgtcacacagaaaccaacttttcagccgcggcagcatcaggtgttagggagagacacctcctggcagcacatggaattacaacctagcacaatcagacactggaaccagccagggactgggtttcagcagccatcggtggaataccaggagattcccaagagtgggagaaaaatcccataccaagaaacaatcatggataaggcaccaggaagacatactaggttacaaaagcccatccaaggccaggcgcagtggctcacgcctgtaatcctagcacttttggaggccaaggcgagcagatcacttgaggtcaggagttcgagacaaaagcccatccaccaccagacataaatctcctgtgtcacatccctcaagccatgcatggctgcacagagatacataataataagtgtcggtcatttgaataaataaatgattgattgattaattctgattatttcagaactctaccattaagcattttattgtcttctttaacattctttttcagttggacacatattatgaagggaatgtagagctgggatttactgcttcaaacaacttagctgacacagaagtgttcgatgatcaaggaacgtctggactttagcaaaatcatcaagaacaagaaaacatcaagatgagtttctggtaaagcataaaaagaagttcctggctaggcacggtggctcacgcctgtaatctcagaactttgagagaccaaggaggacagatcacttgagtccaggagtttgagaccagcctgaccaacatggtgaaaccccgtctctactaaaaatacaaaaagtagccaggcatggtggtgtacatctgtgatctcagctactcaagaggctgaggcacgagaatcgcttgaacctgggatgcagaggttgcagtgagctgagatcatcccactgcactccagcctgggcaacagagtgagactctgtcacaaaaaaaagaaagaaagaaagatgttcccatttttttttcctttggcccaagatggtggaaatgaaagatggcttactggattgggaaatggattggaccctaaatcattctttatccactcgttccacagatactgattgggcctcttggtagccaggcggcgggatgatgagtagtgctggaggccacttagctgagttgtgcacacaaaataacacaatgcacaaaaggtttatcttcaggaactcatcccgggtagaacaagtgctcagcagagatctgggctggtgaaggcagcttgcggtccctgactcttctgagaacctggggatccaggttcagggagaccaacgctattggatacaaatcttgaatttaaagaaattgggatgtaaataatgatgcaatccccgaggctcatggagtaccccagtgacaggagaggttttccatgggattcaagcaggctaatcagcaagacaatctgggctgtctcagtgagccgtggcctgaggctacttgtgggccacctgtccagaattggaggggtcccagggtctgatgtagcttcagagagatggaatagtaaagaggatcatgcattgcaaagtccacaacagccccccaaaacaaggacagtccccttatttgatgaacttttgttgggttcctgtcttgtgccgagctgtgtgctaggttctggggagacagagaccaataagcttcagagacctgagaagtagggtccttctcttcttcatcactttcttcacaaacccacttcagtttcctcttaactcctggcatgagtaaggtgctatttcataacccttttatctttattaaaggtgtcaggtatccaataggaaaaaaaatgcacaaatgaatttaaaaggcattcacacaaaaggatatcaaaatggccagtaagttcataaaaagatgctcaacatcagccaggcgcggtggctcatgcctgtaattccagaactttgggaggtcgagatgagtggatcccttgaggtcaggagcttgagaccagcctggccaacatggtgaaaccctgtctctactaaaaacacaaaaaattagccagatgtggtagcacatgcctgtaatctcaggtacttgggagactgaggcaggagaatcatttgaacccaggaggcgaaggatgcagtgagccgagattgcgccagcacactccagcctgggcaacagagcgagactccgtctcaaaaaaaaaaaaaagatgctcaacctcaatggttacagggaaatgcaaattagacccacaatatgctgtgactatacactccctagaatggctaaaattaaatttctgaaaatatcaagcattggtgaggatgtggaggaagtgaactcttacatgctgctggtggaagtataaaccagtacaagcactttggagaaccatttggcagtttcttctaaaattaaacatacactcaccatgtgaccaagcagttccactcctgggtatataccctgaaagaaatgagtgcgtacacacaccaaaaaacatgtacaaaaatacacattgctgctaaatcgataacagccaaaaactaaatacaactcaaatgcccatcaatagaagaatagataaatacattgtggtgtacagcacagcaagaaaaatgaatgggttgctcttacgtgaaatatgaatgaatctcaaaaacacaatattgatcacaagatatcaaataagccaggcacagtgtggctcacacctgtaatcccagaaccttgagaggctgaggccagaggatcccttgagtctaggaacttaagaccagcctgggcaacatagggtgaccccatctctacaaaaaaattttttaaaaattagctgggtgtggtagtgtgcacctgtagtcccagttcctcgggaggctggagcgggggcaccgcttgagcccaggagttcaaggctgcattgagctatggtcacaccactgcactccagcctgagtcacagaggactaagacccctttttaaaaaataaaaataaaaaataaaaaaataaaaggcaaaacttatctacatatgatgagagaggtcagaatagtgtctacttgtttagggcagtgggagatggggattgagtgagaaagggcctgaaggaacttactagaatgatggaaatgttctctatcctgatcttggtggttgttacatgagtgtatacataggtaaaaattcattgagcatccacttaagatttgtgtattttactatatgcaaattatgcatcaataaaagagcaaaaacaatcaaaactcttaggtgaccacacctgatataagcatggctgatacattaaaaagcttgcatatattacaatgaataccatcatttgggaatttaatataattttgtaacagcctcagaaacagtcatattccagaggcccttggcaacagctttgttgcttacagctcaccagcaccaaaagggacccgtcgctttccaaccaagggggctgtggccctgcccagaactctcaagggatccacctttctgggtcgaactctcacagctcccagagtacctggggccaagcacgtgagctgccagcaggccttagcaccctgggatgccagacctgctcaaacttggagagggtcctacaggtccttggaggaaaattacaagccccaagtacactggacacacagagtttgcctgtgatgaaaacttagatgaaggaagaagccctttaggagggtctttcttgtcttctgcagatgtgcggctctagccgtgctgcaacgcagaccatggaccaggagctcccaacctcagctgcacagcacaggggagcattggaacatgggatgcccggaccgtctgacccacaccaactgaatcagaatctttaatatggtgtttctcagagggccccctggagccacagcaacattgtcacctgggaacctgttagaaatgcacattctcaggccccacttcagacccactgaattctgtggccagccccagcaatctttgttctgactgttctcacagtccctgccaggggttctgatgcatgtggaagtgtgggacctaattagaaactgcatttctagcaagtttccaggcggtgcagatgtggctgctctggggactacactctgaaaaccaccagagtctaactgtctaatgggtagagccaagctctgggagagagtgggggaaattaaaagctacccaggtgagtggctctgatgcaggtgagagtaattagcattgccatagcctctcatcgtctcatctgacaagaggtacacagctggagagggagctcacacaggtgagggcgttacaggagaagaaataccatctcctcaatttgacctgtctgtggtctcttcatttctataacactgcaatttggggttcctggtacggcagaatttaggttctaggtgcctagccctgagaatttgttctggcaatattgaagctggagacgtttttgttagaacactttgcataaaagcctttatggggaaggggacctgattttaccttaaaaagctaatttttggcccaagatagatgagacttagaaggggagaggaagtaaaggaggagtaaagagaatgaaaagaagagatgatgtgcagggctggggaggagagagcaaatggggaggaagagaaagaactgtgagagaaggactgaaagatcgtctctcctttccaaggagcgtccgccctctctctttttttaaaattgagcactgagaagggatttatgcaagactgggtgcaagagctgggcaagctgatatgcaaagcaggaaagcaaaggattgaaaggagtcaaagtgctgtctttggcagcacatgtataaaattggaatgaaggccgggcaccgtggctcacgtctgtaatcccagcactttgggaggctgaagtgggcggatcacttgaggccaggagttcgagaccagtctggccaacatgatgaaacccgtttctactaaaactatgaaaactagccgggcgtggtggtgcatgcctgtaattccagctactcgggaggctgaagcaggaactcaggaggcacaggtttcaatgagccgagatcacgccactgtactccagcctgggtaacagagtgacactctgtctctaaataaataaataaaactggaacaatacagagaagattagcatggcccctgcaaggatgacacacgaattcatgaaaagttccatatcaataaaaattattttaaaatttttttaaaagaatgagttaaaggagaccccaaaggagtgagtgggggctggaggccaggcccaccatggcagagggtcagacttcatcagggtgaaaacttcctgctgtgaaaagccaaactacagactgggagaaaatgttcacagcacctgtatctgaaaaaggatttgcattccaaatacataaagaacccatacaactcactaataggaaggcaaacagtgaaaactgagcaaaagacatgaacagacacttcacaaaggacatgcaaatggccagcacgcacaggaagagatgctcaccctcagtagtcttcagggagatgcagaatgaaaccacagtaagatgctacctcacactcacaagcatggctgaaaataaaaagatgtgtaataccagtattggttagaatgtagggcagctgaaactcctagctcactggcaggaacttaaaatagtacaggctggatgcagtggctcacgtctgtaatcccagcactttgggaggccaagacgggcagactgcttgagcccaggagtttgagaccagcctgggcaatgtggcaaaaccccatctctactaaaaatacaaaaaattagctgggtgtggtggcatgcatctgtaataccaactaccccagcaggctgaagtgggagaatcacctgagccagggaggtcgagactgcagtgagctgtgatcatgctactgctctccagcctgggtgatagagtgagaccctgtctcaaaaaataaagatacaaataaaataaaatagtacaactgcttgggagaactactggagtttattttaaatctaaacaaacacccaccatttgacccagcaattctactgttatgtatttactgaagtaccataaaaacataggcccacaaaaagacttgtacacaaatgtgaataggcgtaagtagctagtggccaccataatgctgttggatttgattgctcaaaagcttgtggaagtctacattggaataataggttgcctttttaaaaggcttgtatccaaatgtgcgtaacagctttattcacgattgctaaaaattggaaacaattcaagtaatccatcaactaggaaatgggtaaacaaaatttgttctcttcatagaaagggatagtaataaaaagattgaaattactaatagatgcaacaacatggatgagtcttaaaatcactgtgtaaaataaaagctggatgcaagagtgcctaccatatgattcatttatataaaatttttaaacaaagagaactaatttatagttacagaaagcagatcaacgatgaactgggactgaggtgactgcaagtgggggactaaaacactttctggggtgatggacaggtgttatatcttgtttaggtgcatgcatttgtcaaaagttgtccaactgaatgcttaaaatgtatgaatgagttttattgtatgtaaattatacctcaataacgtttatttaaaatgaattggccggcacggtggcttacgcctgtaaccccagaacagcactttgggaggctgaggcgggtagatcacctgaggtcaggagttcaagaccagcctggccaacatggtgaaaccctgtctctactaaaaatacaaaaaaaaaaagaaaaaaaaattagccgggcgtggtgacaggcacctgtaatcccagctactcgggagtctgaggaaggagaattgcttgaacccaggaggcggaggttgcagtgagccgagatcgtgccattgcactccagcatgagagacagggcaagactccgtctcaaaaataaataaataaaatgaatcaaaaataaaaatataaaaaaatagcagaaaagaaaaaaggacaagaataaaataaaaataaagaaaagaaaaataaagaaaaaaataagaaactttgtggtaaaaataataaaacagtaaaataggaagagcacacagaatgggaagagaaatggaccaaggtgaaaaccgtgaagagctgtcgaacttgaagaatagaaaaggaagaatgagcagagatgcacaggcagaggtcagaatgaagtcctctgggggtcaaagaagtaagaagcttggtggccacagacagcagagagttaaaagagccaagggggccagccagtaagattaatgcctggagagggctgtaggatggggcccgagtggagaagtgactcctgagaggccagttctgaaggtgggttgaggggtgataacttgggctgagggagcagagaaggagccttcggcagctttgtcagggagcctggggaaggagagtgggctccaacaggaggctgctgggagaaccccaggggaaacccacctggtggcctcaatctcctgacactgtctttcacgtcttcattcctacacagggatagatattgctatttgaccactgcccctgcacaaggtgtgccaaaagtccccaagcccctttcccataagaagtttactgtatgtttgcactgaggaaagctaaataagctaggtgaattccccaccccaaattcctagggatgccgctggcttgccccaccaaatcggtctctcctatctgcctgtattgctggtgggaatgtactttggtttgacttccataggagctggtttggcaaaaactatcaaaactacaaatgcacactggaggtacaaatacaacaggaggtatttatgctacgataaacttgcacacggatgaaaccatgtatgtacttggttatttgttgcctcattgtgatgctgtttgatcaaaacagacccaaatgcccctcaagaaggccattagataaatactaatatgttttgttttgttttgttttgttgagatggggtttcactcttgttgcccaggctgaagtgcaatggcatgatcttggctcactgcaacctctgcctcctagattcaagtgattctcctgcctcagcctctcgagtagttgggattacaggtgcccatcacaacacccagctactttttgtatttttaatagagacagggtttcgccatgttggccaggctggtcttgaactcctcacctcaggtgatccacccacctcggcctcccaaagtgctgaaattacaggcatgagccacctcacatggccgtattttttttttttttttgagacagagtcttgttctgtcgcccaagttgaagtgcagtggcgcaatcttggcccactgtgacctccgcctcccaggttcaagcaattctcgtgtctcagcctcccaagtagctgggattacagacgtgcaccactatgcccagctaatttttgtgtttttagtacagacggggcttcaccatgttggccaggctggtctcgaactcccaacctcaggtgatcagcctcagcatcccaaagtgctgggattacaggcgtcagccaccatgcccagccttaatatgtattaagtatgtatattcatcttagtccatttgtgttgctataagaaaataccttaaactgggtattttgaaatttatttatttatttatagacagggtctcactgctaccttcatcttccaggctcaggctatcctcccacctcagcctcccgagtagctgggaccacaggcgaacaccaccacatccagctgattttttgtgtttttggtagagagggtttcaccatgttgcccaggttggtctcaagctgctgagctcaggtgatctgcctgccttggcctcccaaagtgctggggttacaggcatgagccaccaggcccagccttgaaacttattgtatttattacagctctgttgactggaaagtccaagatccatcattgctgcctggtgagggatgctctctgcttccaagatggcaccttgccgctgtgtgctcacatggtagaaagtggaaggacaagagactgctcccttcaacctccagccctttcataaggctgctaatcccagtcataagagcagagctctcatgacttaatcacctcccaaaggctatacctcttaatactggtacattggggatttcatttcaacaggaattttggaggggattgcatatttattgtactttattcataatttaatatctattttaaaaattatagccacatgcatgcaatggatactattcaggcacaaaaaacaggattctctctatatacagacatcgaaagtcttccgagttatattatcaagtgaaaagaaaagcaagacacataacagttatatagtacaaaatctttttccttttttttttgagacagagtcttgctctgtcacccaggctggagtacagcgacacaatcttggctcactgcaatctccgcctcccaggtttaagagattttcgtgccttagcctcccaggcagctgggactacaggcatgcaccaccacacccggctaatttttgtatttttagtagagacagggttttgccatgttggccaggctggtctcaaactcctgacctcaagtcatcctcccaccttggcctcccaaagtgctgggattacaggtgtgagccactgcactcagcctacagtacaaaatcatttgtggggtttttttttaaaggtatgtgtatggaagctgggtgtgggaggcttacacctcccagcactttgggaggctgaggcaggaggattgcttgagctcaggagtttgagaccagcctggccaacatggtgaaattccatctctacgaaaaatgcaaaaataagtcgggtgtggtggtgtgtgcctgcagtccccgctactcaggaggccaaggtgtgaaggtcgcttgagcccaggaggctgaggctgcagtgagctgtcattgtgccactgcgttccagcacaggcgacagagcaatatcttctctcaaaattttaaaaaaggtgtatggggtagggtgtaaaagaatatatttgctctgtcacccaggctggagtacagcgacacaatcttggctcactgcaatctctgcctcccaggtttaagtgattttcgtgcttcagcctcccaagcagctgggactacaggcacgcaccaccacacctggctaatttttgtatttaaaatacacctcccccataaagtctttgcaggtgttggggagtgaacccaggaggtggagcttgcagtgagccaagatcacgccactgcactccagcctgggtgacagagcgagactctgtctcaaaataaataaataaataaataaataatttaaaaaaaaactttactcttgggttcaatactgggggattgcaaattaaactgaaaaaaagacagattagcaagaaaaaagagtttaattacccggggaatgcacagacacatagaagtgctcaatgacggagtggttagaactgggggcttatatgccttagaaggagaataggagggctaccatgggaagaacaaatagatttacaaatgggtttttaggagaagaaacagggtattttagaagtttgtgatgaggtttatttatgcaggtgcaaatagtctctgtgtcttcctcatggccatgaaactcccctgaatagaagatttgtggtaggtttattcttggtccctctcctggaagtggaagctgccccaaagacagaatgtatggcagtcttcagttccaagtgggccgcacacaaggatacacaagaaactgataatagtggttacacatttgaagggcaggggatagaggtgaatgaaaaccaagaagttgtgaacagggacttgggaagacgtttttagaaattttttcatctttattttttaaattttagaaagatatgaatatattgcccattcagaaacaaacaaacaaacaaaaaaccctaggttctaagagtgattgtaattcatttaaggagtggtttccccctatttaggaaaagatggatcgtgcctcattagcaaggcctagtgggattcagccctgagggaggtgcaggagattttatcatcatctttgtcagcatcactgcactttctacagagaaggttacagaacagggtcaggtcgtcgccctttctactttgcttagagggacgcttacagcctgtgtcagctgtcagtcccaagacctctgtctccccagtctcctccagcctccagaaaaacaaaggcagctgtggagggtagaggatgggctaggggtgggacccaagactcactggacaatggaaacctttccccttcaagcagatgtcaggattattatttgcactttgcatgtggaaaagaaggactgtaacacgctgacaaatgcctgcatcttgttctaaaattcctgacttgttgccaataaaagaatcaaagtgctttctagctcagagaaaaagctgctgctaatttgaagaagattccagaatagaaattcaggtcaaccaaaggtttttcagacagagttgatgagcaggtcttacatggcctgaaattcaaagatacaaaccagagaaagaagagatcaaagctcttgtcctggggacacattaaaaactagatctggacacatctcagttctggagccaagcaattcctccctcagggtgtcgaaactagtcttctcctcagcctagagccctcctctctaaacctgcttattctggccctgtcttctcatcttggtctcatcttggtctctttgaggtagaaaatcagcaggacttattttctgagcacctgtaaggcccctgctgatcaaaactaggatgcagggccgggcatggtggctctcatctgcaatcccagcactttgggaggccaaggcgggcggatcgcttgaggtcaggagttcgagaccagcctggccaacatagtgaaaccccgtctctactaaaactacaaaaattagccgggtgcattacgcgtgcctgtaatcccagctactcaggaggctgaggctggagaattgcttgaacccgggaggcggaggttgcagtgagccaagatcgtgccactgcactccagcctgagtgacagagagagactccgtcatacacacacacactcacacacacaaaaacaggatgcagtaaagaagccagctgaaaccagtacatggccaccaaagtgacctctggctgccctcatttttcattactaaatagactcccaccggtgccgtgacagtttacaaataccatggcaatgtaccgtggcaatgacccagaagttaccttatatggttccaggaactctccaccctttttctagaaaattctgaatgactcaccccttcattcgcatataattaacagtgggtataaatagaactccagcaatccaagcggtagctcctgctctgattcctcctccacattgctactgctgcctcacactgccactgttgctcaggactgctctgtggagcagccagtttgctgtacactgctcctctgggctactctgggctactctgtctatgggacagctctgccctgtctgcggagccaccattttgctatacactattgctctaataaacttgctttctttcactgtcaactcactcttgaattctttcttgagcaaagccaataaccctcccaggctaagccccaattttggggttcatctacatcaggctcagagagaccttctccgatcatccaaaatatacagtccatccaatgtatctaacatatttcctattttattctcttcatagcactgaccacaaatgaattcttacttatttgcttatcatccttctcttccagctagaatgtgctctcatggtacagtcgtactgttttgtctccctatgtccccagtgtttagaacagttacttagtacacagcaggtgctcaatcaatataggctcagttaatgaaaaaatgattaaaagttaaacttgagatgtctgtgaaatatccaaggagtggtgtcaagaagagagttgtcaagtagtcaagtgtgggaaagatccaacctagaggtacatatttgggtattactggaacaaactcagtttttttaaaattgataaaaattgatgacaacagcaaaggagaatttaaagaaggaagagcctgagctccaaggagcccaaaatttacaggttgggtggagaaaagggaacaagcaaagaagagtgaaagagatcagtgaggtagaaggaaatccaagagataagttatcccagaggctaagagacaagactgtttcaaggatgaggaagcagccacctatgtggaacaccaccattggaattgccagcatggagattgtctgggccctgataagagcaatttcaaggcagcggtgagggcagaaaccactggtggatgggaggtgaggcagtgggagcactgagtgtcaatgacttcagaagtttaactgagaagaccagcggataaattggatgtagctataggcagatatagctcaaagaaaaattcttagccaggcgcagtggctcacacctgtaatcctaacactttggaaggccgaggggagcagatcacctgaggtcaggagtttgagaccatcctggccaacgtggtgaaaccctgtctctactaaaaatacaaaattgcttgaacctgggaggcggagcttgcagtaagctgagatcgtgccactgcactccagcccgggtgacagaacaagactccgtcttaaaacaaaaaaaaaaaaggaaaaataaaagaaaggttctttttctgctcaactttttatttttatttttattttttttaaattggaagaattatattaccagattttaatacttattacaaagctatagtcatcttgacttatgtggtattggcaaaaggagagatgtacagatcaatgggagaaaataaaaagtctagaaatagacccataccaatatggctaattcctaaaaatgaaaaacctacagaaaagttgaaaggatagaacaatgaacacttctgtacccttcactttaatcatttgtcaaccctttgtcacatttaattcccatgcacatacccgcatgtattcactttggggtaaatcactggaaataaagttgcagacccccctgtatatcagcatgcttttcctaagaacgagctcattctcccacatgacctcatgatatatcccactcaaagaaatttagcatcaaagttatctaataaagagaccatattcacatttccccaaatgtttaaaaatgtcctttgtagctttttctctggtccagcatccgatcaagagtcatgcattccatttggttgccacatctctgtagtctcctttaatcagaaacagtcccctgtatttttctgtctttcatgccactgacattggagagtttgggctggttgtcacgtagcatgtcccacattctggattgtcctgatttttttgtcatgattggattcaggttaaacattcttggcaagaatatcacagagatgatatgaactcttaagggtgaatctctgttaaaggtggacaacactcagcctacttaaatgctgacaaaaaggatccagtagatgggtgatagaaattggaaggaaatttggacggggaaggaaattagaaagatgaatgaagtaatgaagttttgagttggcaagagaggtggagtcagagcacaggcaaaggggtttgccctgacagggagcagacgcatttcgtcggtcgtaacagacgagaaggagaagatgctgacaatgaatgtggtctgaaatcgggagaaggagtgtgtttggatttgatggcttctttttggatttgacggtcttcttctcagtaaaataaggcagcatctgcgggtgaaactgacagtaagagtagaagagtggaggggagtttagaggaagagaaagtatgacaaagtcattggtggcagtggcaaagcaggcttcctggagaaatataaaaagctaggcatactgttagtgggaatgtaaactgtggaaaacagtattgtggttcctcaaaaaattaaaatagaattaccatatgatccaccaagttcacttctgggtttatactcaaaagaattgaaatcagaacttttaagagacattcatacaccctggttcacagcagcactattcacaatagccaagagctggaagcaactcaattgtctgtcgatggacgaataaacaaaatatagaatacacagtggaatattattcagccttaaaaaggaagaacagttgggtgtggtggctcatgcctgttatcccggcattttgcaaggctgaggcaggcggatcacctgaggtcaggagttcaagaccagcctggccaacatggtaaaaccctgtctctactaaaaatacaaaaattagccaggtgtggtggtgcatgcctttaatcccagctactcaggaggctgagacaggagaatcacttgaacctgggaggcggaggttgcagtgagccgagattgtgccaccacactccagcctaggtgacagacaagaccccatctcaaaaaaaaaaagaaaagaaaagaaaaaggaaaaaggaaagacattctgacacatgctatatcatgaatgaactttgaggacattatgctaagtgacattagccagccacaaaaagacaaatactgtatggttccatgtatgtgacatctctagagtaataaaattcatagaagcagaaagtagaatggtgattagcaggggctttgtggaggagtgggcaatggggagttttttaatgggaatagagtttcagcttggaaaggaaaaaattctggagcttggtcgaacaacaatatgaatgtacttaacactactgtattgtacacttagaactggctgaggtaaaatttgtgttgtatgttttcttaccaccataaacaaacaaactaacacaaatatacatacacctatggagggaaaagaagttaggcaggccatgtttagtatccaattgatgcttgagataattcatttatagagaaattagctgattagctaagttacaaacttttctccagcaatattctgctgctcaggtatgtaggtagagaagggaaatatttgtgttcattcaggatggggctctacaaagagagaggggccagggagctgaaggagtttgtgaagaagtgtggtagattgtcttactgtccaataagaattttctcctcctgccttccctgaccccaacccagggcatggaaaagagttccctgcccacattgcccttgggcttgaccattgacttgttttgaccaacaggctggcagaagtgtcagggtgcctgtcccaaggctgggccttaggaagtcttgcatgttcccctccttctcttatgctcctgccatctgccatggaaagagcttgccccagccagccacggctccttcactgcggtcgtagaataacagacccccaagcaccaagcccagttgttaagcaccagaccagtgggactcttgggaggaaggacactgtgctgggtaagccactgagatttgggggcttcgtcaggtggatttcactatgtgaaacagttttgtaccctgtttctctccctcaacaagagatcttgagcatttggccaggtgcagtgcctcccacctgtaatcccagcactctgggaggccgaggttggcaggtcacttgaggtcaggagtttgagaccagtctggccaacatggtgaaaccccatctctactaaaaatataaaaaattagctgggtgtggtggcgggtgcctgtaatcccagctacttgggaggctgaggcaggagaatcacttcaaccaggaggcagaggttgcagtgagctgagatcgtgccattgcactccagcctgggcaacagagcaagactccatctcaaaaaaaaaaaaaaaaaaagagagagcgagatcttgagcatttaaaacttcaaggacattattctcaatggctgaatattccatttaataaataacataatttactgaatggttctttcattattgggacacttagaattttccatgttttcattgtattgcaggaaataaaatgaaataacattgcaggaaatattgtatataaattccaaatacaaggtataaatacttttaaatttatattttgaccccagtacaatatgcatatggatttttaaaaatcaaacaaaaaataacaaaagattagtggatatttgaacaaagcctctaaaaatcaaggacagaaactgtgaggtattgctaggatagccccagtttcttctaccaggaggttgaattaataatttcaccacagccgggcagagtggctgatgcctgtaatcccagcactttgggaggtcgaggcaggcagatgacttgaggtcaggagtttgagaccagcctgggaacatggcgaaaccccgtctctactaaaaaaaaaaacaacaaaatttagccgggcgtggtggcgtgcacctgtaatcccagctacctggtgaggctgaggcatgagaatcccttgaacatgggaggcagaggttgtagtgagcagctgagatcacgccactgcactccagcctgggtgacaaagtgagactctgtctcaaaataataataataatttcaccaccactgagatgatctcgtgacatgttttgtccaacaaaatgaggcagaagtgacattatacagttctgatcctgggtctcaggaggcctggggtttctgctgtgttgcagaaccctgcccagccatcctgagaacagcccaatctggcctgcctgatggaggataagaaaccacatgaagcagagccaagtaataccagctgagtcctaaaagctccgccagccccaactaaccaccagctgcctttctacaagtgaatgatcccaagcaaagtcagcagagcccaatataaatcagcagaacaaatcaaccaaccaaccaactggtagacttgtgactaaaaacagatgatacttttatatgtcactaagactttgtagttgtttattaggcagcgtcattgtgccagtagataaccaatacaggaatcaaaactttaaaaacaggaaaagaagcttccttccagttttcaatcggacatatgaggaacttggaagtcatgactccatcttaataagttaaaaaaaccgaacaaactaaaaatcagcaactcttggctggttgcagtgggtcatgcctgtaatcccagcactttgggaggctgaggtgggaagattgcttgagctcaggcgttcgagaccagcctgggaaacatggggagacccccgtctctacaaaaataaaaaataaaaataagctgggtgtggtgacgtctgcctgtagtcccagctacttaggaggctgaagtgggaagattgcttgagtctgagggggtcaaacctgcaataagccaagattgactgggtgacagagtgagactgtctcaaaaaaaaaaaaaacttcttagatctgtcacagaattgaggtcacagggcaaaccactgcctccaaaattggagagacagacagatcgtacagagaatcacaacttatcactgcagagtcacaggtgcagagaccttgctaggaacaagtacagggacaggaaagcctgaactgcaatttacaaattgctggaggctcagtgtggacaagtctaagagtttaaaactccggggatggggccagtcttgaagggcatgcccatacttttggtttcttgggggtttttttgtttgtttgttttgagacagggtctccccctgttacccaggctggagtgcagtggcacaatctcggctcactgcaacctccacctcccaggttcaagcgatcctctcatctcaacctcctgagtacctgggataacaggcgtgtgccaccacgcccagccaatctttgtatttttagtagagatggggtttcaccatgttgatcaggctggtttcaaactcctgacctcaagtgatccacccaccttggcctcccaaagtgccaggattacaggcatgagccaccgcgcccagccacatgccatacttttgtgagttttaccttcaggagttctactggtttctcacagtaaagactggagaaaacccccctcatgaggtttcttacaaagctaaccattctcctaccataccattttcatcaatcacactccttagtatttactcaaaggacttgaaaatgtgtccatgcaaaaacctgcatactgacgtttatagcagctttatttgtaattgccaaaagttggaagcaaccaagatgttcttcagtaggtgaatgggtaaataaaccagtacatccagagaacggaatattattcagggctaaaaaggaatgtactctcaagctatgaaaataaatagaggaatcttcactgtttattacttagtgaaataagccaacccgaaaaggccgcatgctatatgattctaactatatggcattcaggaaaaggccgaactatggagacactagaaagttcagtggtctccagggtttgggaagggtagggaggggtaaacaggcagagcatacaggatttttagggcagtgaagctattctgtgtgatactataatgatgaatgcatgtcattatacatttgtcaaagcccaaagaatgtataataccaacagtgagccctaatgtaaacttggactttgggtgacaacaatgtgtcagtgtaggttcaacaattgtcacaaatctaccaccctggtacggggtattgctgacgcagaagactgtgtgttgtgggttggaggaaggaggtatatggtagctgtactttctcttcagttttggctaaactgttaaaaaaaataagtgttcttaaaaaatgatcatgccaggtgcggtggctcacgcctgtaatcccaacacttggggaggccgaggcaggcggatcacgaggtcaagagatcgagaccaccctggctaacacggtgaaaccccgtctctactaaaaatacaaaaaattagccgggcgtagtggcgggcgcctgtagtcccagctactcgggaggctgaggcaggagaatggcgtgaacctggaaggcggagcttgcagtgagccgagatcacgccactgcgctccagcctgggcgacagagcgagactccatcaaaaaaaaaaaaaaaaaaaagatcaaaagtctcaaagcaacaatgtaaggtcccacctcaagaacttaaaaaaagaagagcaaaataaactcaaagcaaatagaagaaagaaaataataaaagcagaacttaatggaaacaaaaacaaaaaaaaataataaagtcaataaaacaaggagttgattcttggagaaaacaacaaaattgtcaaaactttaccaagactgagaaagaaaaaaggaaaacacaaattaccaatatcgggaataaaacagaggctatcagtagacattgcagacatcgaaagaataacaagaaaatattacaaactgctctacacatataaatttgataacacagattgcacaaaaagaaagtaaaatactcagatatacatctatcaaaactttccggccggcacggtggctccatgagccgtgttcgtgccacggcactctggcctaggcaacagagcaagaccctgtctcaaaagtacaaatttaaaaaaaaaaacttgcacaggatctgtaggctgaaactacaaaatgccagtgaaagaaatcaaagatctaaataaatggagaggcatcacatgttcatgaattggaagactcatcacagaaaagatgtcagttctccataaaaattgcataggtttaaaaaaatacccatcaaaaccccagcagagttttttgtagatatagacaacattagtttaaaatgtatccagaaaggcaaaagaatagctaatacaattttgagaaagagaaataaaatgggagtaatcagcctacccaatttcaagacttacaatacagctacagtaatcaagactgtgttgtgctagtggaggaagagacacatagatcaatggaacagagcagagtatccagaattagatgcacaaaaatatgcacgactgatatttgacaaaggcacaaacacaattcaatgaagaaaagttggccttttcagccgggcgcagtggctcacgcctgtaatcccagcactttgggaggctgaggcgggtggatcacaaggtcaggagttcgagaccagcctggccaacacggtgaaaccccatctctactaaaaataaaaaattagccaggcatggtggcaggcacctgtagtcccagctactcgggaggctgaagcaggagaattccttgaacctgagaggcggaggttgcagtgagccgagatcgtgccactgcactctagcctgggcaacagagcgagactccatctcaaaaaaagaaaagaaaagaaaagaaaagaaaagttggccttttcatcaagtgatactgggacaactggatagccagaggcaaaaaatgacccacctaaaccccacaccttctacaaaaattaactcaaaatggattgcagacttaaatgaaaaatgtaaaaccataatacttttataaataaacaaagaacatctccagagtttagggcttacacttgatagcaaaagcactatctgtaaaaggaaaaaaactgtatattgaactttatcaaaattaaaactttttgctctgggctgggtgcagtggcttatacctgtatcctggcactttgggaggccaaagcaggaggatcgcttgaggctaggagttcaagaccagcctgggcaacatggcaaaatcccatctctacaaaaaattttaaaattagccaggcatgctggcatgtgcctgtagtcccagctacatggaaagctgaggtgggtggatcgcttgagcccaggagtctgaggttgcagtgagctgtgatcacaccactgcactccagtctgggtggtaaagtgagaccctgtctcagaaaactattattattattattattattattattattattattgttattgttattttgctctgtgaaagactgttgagagggtgaaaggcaagctataaactaggagataatatttgtgagtcacttattcaacaaaggacaagtatttagaaaacataaggaatccctaaaactcaacggtatgaaaatacgccatccagttagaataaaatgggcaaaaaatatgaagagatatttctctgaagaggatgtacagataacaaataaatacatgaaaagatgctcaacaatgtcagccatcagggagatgcaaattgaaaccactatgcgatattatacacatctatcagaatggctaaaatacaaaacagaatagggacaacatcaaatgctggtgaggatgtggagaaaacggatccctcatacattgcaggtgggaatgtaaaatgaaatagccccctggaaaacagtttgacagtttctttaaaaaaaaaaatctaaacatgcaactcccatatgacccaacaatttcactcttgggtaattatcccagagaataaaaacttaagttcagatatgaacttatacatgaatgattatagcagccttattctcaacagcccaaactagaaagaaacctaattcctttaatgggaaatggttctaaaaaagatagtacttttatatcatggactactattcagcactaaaaaggaataaactggtcaggcacagtggctcacacctgtaatcccagcactttgggaggctgaagcaggaggatcactgaagccaggagttcgagaccagcctaggcaacatagtgagaccctgtctctattaaaaaaaaaaaaaaatagctgggcatggtagtgcagcctacagttccagctactccagaggctgaggtgggagggtcgcttgagcctgggaggttgaggctgcatgatcacaccactgcactccagcctgggtgacagagtgagacactgtctcaaaaataaataaataaataaataaataaataaaaggaataaactattgatacaaataataacctggtaggattggcagaaaattatgctaagtgaaagaaagccaattataaaagtttatatattatatgattccattcttgaaatgggaaagttagagaaatgggttaaggagggagtggctgcaggaggcaagtgggtgtggctataagagagcaacacgaaagatcctggtagggacagaagtgtgtgtatctgatgtgttatgtcaatgtccacatcctggttgtaatattgtactgtagttttgcaggatgttaccatagcagccaaggatacacaggacctctagattattttgtacagttacatgtgaatctagtatatttatctcaaaatagaaagtttaattgaaaacaatcaaacattaaaagatgcattaaaagatggagtcagtgacattttccaaaagtagaacagcaataaaaaaataagatggaaagtaggaaacaaacccacaagaaagagatggcattcattcaggtggtctgaaattgtgaaggctaattttatgtcaacttgactgggctgagggatgcccatggctaaacattatttctgggcgtgtctgtgaggctgtttccagaggagatccacatgggaattggtgaagtgaataaagcaaatggcctccctcacttgggtggccatcctccaattcactgagaacctgaataaaacaaaacagcaaaaaagaacaaatttgctctgtttgagctgaaacatccttctcctgcccttggacatcagcacccttggttctcatgcttttgtgcttaagctaagacgccaccagcctcctgattctcaggccttctgacttccactgatctccaccaccagctttcctgggtctcagcttgcagatggcagatcatgggattcctcagcctccataaccacacaagtgaattccataagaaatctcagccgggcacggtggctcacgcctgtaatctcagcagtttgggaggctgaggcgggtggatcacctgaggtcaggagttcaagatcagcctggccaacatggtgaaaccctgtctctactaaaaatacaacaattagctgggtgtggtggcacacgcctataatcccagctacttgggaggctgaggcaggagaattgcttgaacctgggagtcagaggttgcagtgagctgagatcgtaccactgcactccagccctggcaacagggcgagactccgtctcaaaaaaagaaacacaacaacaaaagaaatctcaatctttctctctctgaaaaagcaagagagcatgaatgtcatgttggttctttttctctggagaaccctgactaacacaatacagacatccaactcagaagagttccaagaaagaacagagaaaacagtggggaaggagattatcaaggaactaatacaaaaaaccaccagaatgaaaggaacttatttcccacattgcaagatccatataaaggtaaatcatcacaaaatgtcagaactctagggtcaaagaacacagagaggaaaaaggaaaagggtcttctgggggttctgtggtataagccatatcacttctcgctcccctgcccgccccccgcccccgcccccgccccccactgctgactgaggatgcagtagcctcccatctgcgaagtcaatgaccactcctccatctgcttcccagctccattctctgggggtcttgctcatcttactgtcagtttagccaagattcaggagagagctgagcctaatacctgggctcagtctaccctctcaactcagaagtcgggcgctagaatgttaccctacgttagattctgaaatccaaatttttgcttctgcctctggccacctcacaagggactcacgtgcaaccaagcatcggcgatgccttccccacctctcaggctgcaacctggccagggcggctcttttcacgtgactttgcccttgatatgcttgttcatctgagtccatatgttacctgtttagcaagtgggtgatggcgtccctctgtgaggaggtagacggatgctgagaaaattagttcctagtgcaactcgaggggtggggagaggcttttgcctgccttacatcaaccttgctaagatgttattttttaattacacaataatatttgaataatatcacaaaaattaaaccattacaaaagattcctcctatacttgccatttccaataccagaggcataaatttccagtcctttttgtatacattttcctagatgtttatgtatccataagaaatatattgtgctgctttagtgtggatttttttttcctttaacacatgagaaaacggtatgtcatattgcagtttgctttttttttctttttcactcaataatgtatgtcagccaccttcccatgtcaggactggcaaatctcccatctttacattttactattacatggagtttatagtaaggatgacacattttatagccattctgcttgggatagatgtttccgtttttccaggatttttgcaagtgatggggctgcacagcagtctgtggtccaaagccccgtgccggcccataggtgcagtttattagccgtctaccacaagataagaacagaaatttgggataggtgttgagaaacttttatagcaatttggcggggtaatgtcatatcgaatcttccaataaaaattggaggcttatattttctaagtctttattttttaaattttcacttctctagtaattcatttttactacaaaagtaaaaatgtacgtgtttatgacagatcagaaataaaaactagaccacagtctgagcacagtggctcaagcctataatcccagcactttgggaggccgaggcgggtgatcacttgaggttaggagttcaagaccagcgtggccaacatggtgaaaccccgtctctacaaaaaatacaaaaattagccaggcatggtggcatacacctgtagtcccagctacttgggaggctgaggcacgagaattgcctgaacctgggaggcagaggttgcagtgagccgaggccgcaccactgcactctaatctgggtgacagagcaagactccatctcaagaaaaacataacaaaccaaaacaaaacaatagaccttgcccccagattcccagatttttgagaagagctgcttttgtggacagcttaatgcatgcctaccctctcattctcatgtcagcatctctctgccataaatctaaagaatgactctctggggcacaggatttagacatcatttattgtaatcgagagtggcaatttgcccctcaaaaggctagatccccaccaccattggtatcttgttgtaactcacatgttcctgaataccaacgagacggagcttctttttgtatgtgtattatccatatatatgtcctttgaagccagcctcaagtccaggaagtcagccaagtcctgggttgtgataatcctcctgcagcctcatctggtttgaacttcccagaagtcctaggaggtgaaccaggcagggataatttcctctttaaacattccagttcctcctgtgggacattgaggctgaggctgcacccaggccacatgcatatgtatttattggcagggctgggcctgagactaggtctcctagcctagaattccctccaaagattcacgagagtccaaagactaacacccatggcccgggtccaaaagttcactaagaggacaggctgaggctacatgatgggggaaggggggagtcagaattagggccaagaactagatctgggaggtcagggagggaaaggagaaacagtgagaaactgtgacgcagcacaacatatatctcagcactgggaatgtctatcttctggcgctgtcggaggagataagtagattatctgtcagcccaacagtctaagcaaagaagaagccaggagttccttccgtcaattcacctaatcttttaacactgcttatcggtggggtcgatgtaactcaaacctcctaaaacaacacggggtttatcctgtccgactcaagcaatgaacttgcaactaccaagacatcaggccaaaccatcactcattttgctcaggtgtgcctttgtgcaaatactcaccctgccaagtctgggaggccatttccagaaaccatgggtggtgggttgtaatggccggtctgcctcgtggcaggcaagcaggtagcagtgaaggaacatgccatgagaagtgggtgcaaagagagaagatctcagagttgggtggagacttagaaccatctaacccaatccttacccacattcataggttcaagtaccaggtctctgcaccatttctagacattacttagcttccctgaacctcagtttattcatctgtaaaatgggctctgcctgcagtgggtgacattggggctgcacctgtatcctgcagaccctgatcatccctgtgtacaactttgcctgtgtgcttagaagtgttagagaattcacactcccaggagcaacccccccaaatagcctaacaccccaactcctgaggggcaggatcattcttaggtatgagttctacactgtctcccagggaccccccatgagactgagctccagctacccacagcaatgaggtgcttgacaatacaccccaaatcagtcgccctcctctccctctttcacttccctacagccccttgagatcactgtccatataaaacacttgcacaagaatccatgcaacagagtcagcttctgggggaacccaaattaagaaactttccaactttctcacagtgttgttggtaagatcaggtacagctctcagacaaaggtcgaggttatcagcatgaaaccgtggcactattctgtgtgccaggcaaagggagccacaggttagtctgagttgggtattctggggcttttgaactctaggtggtcacatggagactttaaggtagaatgaacataagccgtaaaagacagcagagttggagcctactgggctccgcctggttttaactgctcccaacacaacaatcacaactgccaatctccaagttccaaagaactggctctgccaacgactcagaaataagttttgagcataatctagcccgtagttgatatcaagcagaagatgtgatctgtggttctcatagctcacaatctatgcagaacccaaagagaatatgtaacaattaactgagcaaaaccagcagcaaatcctggaacatcgtgtggaactagaagaagatggtggtttgttgaaagaacacaggagccctgaaggagctccaaatggtcaaggttggaagaatttaaacaataagaaaaataatgatagtttaggacaataacccatagagttaaataaatgtccacaagtccacactgatataagtatttgattaaataagtcaatagggaagtgacagctcttccttgcaatgaaaatccagtcaatccatgcggaaggaaggagcaaaggagaaatcagcattaggtcaacaccacagtggtgattgttgcagacaagagctgctaatagacaacagaataggtggaaggtttgaggaaaaaaggggtttgcaaagccttaagtatctcttccaggaggtttgttgacaagggtggggtttggggacagaaaaaacattaccaaggaaaagcccatcagagaccacttgaccaggtgatcagggccatcatcacagacgtaagccatcaacgccatgcccccgtgacacgtgcagtgagcaggatgcagccccaggcctctggcgcccttgcctgggatgcacaacctgagcccaagttcagacaggcctgaactaagagacttctgcaaagtaactgatcaatactcttcatgggtatctaggtcctgaaagacaaggaatgaccaaggaactattatagagtctagaagactagagagaaaaaaacaactatatgcaaatgcgggatcctggatgggattctggagcaagaaaaagacgttaatgggaaaaccagtgaagttcacacgggatctttggtttgattaaggctgctgtactgaggttaatttcctggttctgattactgtgctatggctttgcaaattgtgctatggttttgcaagattggggtcaactgctggagggacatagagaagttgcctgtaccaggcttgcaaattttctgctacttttactactagttttctaaaagtgggtcaaaatataaaggttttttaaaaaagcatcaaatgtccagtttttcagcagtatctttattagaaaaggaacaatccccacattgtgttgatgtgagcagtactcaaaactgaggcaacagatctcaaaatattttggcatgtgggagtggggaggtaaaggctgaagcctcctctgtccgaagcatgcccccgaggctgggaggaggcaaaaatgacaaatcacatctgaatctgtttggcagaaaaaatgtccagtgacctgtccgagggccagtcacacatttatcaggagtattagcagctccgcattcccagtgcaggtctcccaggtccacgccctagcctcagcccaggacaggctctgatttctccgaaaatgatgtgcaaatctgtttcaaaccacatgaccttttgccacaacctctttgtggcttgttctattggatcagaagccaggagtattttcggaacattgctaatgctctgagcatctcagttctaggcctgtaggccacatatgatgtgcgttgggccagaggcccaggtcaaggtgtctcgagggaaattggagtcaatggtgaagtgagaaagctcttgtgaggcctttggccccagtgggagggccagggacagaggtgggcctgcctggtgagcccacctgcaggcaagaggcaccctggggaggtgccaggaagcagggcgcaaggcaaggaggcaggaacagccacgtctgctcctgccctttaaacaaataccaggctgttcgagtccagagaagaaataaatattgacaaaggtgcggagcggcaggaaggccaggtggccgaggccccagaaggaacatggcctagatagggtctcctgggatgactgcgaggaagcctcagccccgagccaccctccccaggggcccttggcgaggctgcctctacggaggtccttcccccgtctcggcaggtgcttcggcaccttgagggcttggactcaggctgtcaggatgaggagcctatccacgggatcagttgctggtgtttgccaaaggtgtgtcccagaggggccacccgtagcctctgacggtgccacggctggaaggccctggccaaacacctgtcccacttcaacagcgcgttcagtggatcccccaaaccaaagggcctgctggcgttcttcagtgagcttctcaaagtgtgggtgcagggctctcaatagaggcccctgggcgctgggtaagaggcacattcctgagcccacacctacccctccaggacactgcaggtcgaagctcaggaatgtgcattttcaccaccttccctagtgattttaggcagagggctcattagagccaagtaacagaagaggaagcgaagtctcagagagggagcagcactctttggcagcacagggagtgaggggcagcgagggaggagggtccagggcagagtgaagtggccacacctgctctgtcccttggctggaaacagcctaatggtccagacgaccccctgggctatgggagctcaaatcacttcccgccagaaggcttctctgacccctcacctccagcccagggagatgcccctgcctgtcccctgggctccgcggcccctgggcttcctgctcccctggcactgggcacactggaatgcaaataaccaccgacccttgaatgtccccaccagcatggtgcctggcgtgtagtggatacggccgggatgcaggtgcttgagccatgccatcaggaatctctcccatcatctcagtcctgccttcccttctatggccccctgcagtccccactaaccccagcttgccctgcagctccaacagaatgggagtgcatccccaactatcagcccggccacagtcccggggctccctgtccttggactgccaggggtcaggtgccagtgtgtgagccagtatctgtggctggatgcaaggagatgaggctcccctaggctagaccccagtgctctggccacagctgcatgcggggtgggggcagcctaccagaaagggcaagactggaagtggggaggtgccccacaggaaaaccgggattctaccaagggcaggaggctgggcaggcggaaaccagcaccatccactccagcccacctgccctcctgacctcccacaatggctgctctgatgaccagaaggttcctcagaagccagttaaatctgtttctcctaccccacacacctggctctgcctcttcctttgttcccttggtggtcctgaaaggctggctggctgctgtcacgttccccaccaaccaccccaaaccccactcccctgccctcggggtatccctggtcccccccaccttctcatatgtgcagtcttcatgtcgtggattccagaccccggccctgctggctgcctgcccagccaagaacacctgccgtggacacctccccacgcctgggccaccacctgcccagtcctcatcacccgccatccaaaaagtcactctggtgttgaagactcatctaaacctggaccccaaaatgctactggcatttagtcactattccacaggcccgttctgattatttgttattttattttatttgaggcagggtcttgctctgtcacccaggctggagtgcaatggtgcaatcactagctcactgcagccttgattttctgggctcagatgatcctcccacctcagcctcccaagtagctgggaccacaggcacacaccaccatgcccagctaatttttttattttttggtagagacagggtctccctatgttgcccaggctgcgtgattttaaaaacataaatatctccaaattatctgaccctcctagagatgaaatctccctgtggccgctgttcttttttttttttttttttttgagatggagtctctccatgctgcccaggctgagcttgaactcctggcctcaagctatcctcctgcctcagcctcccaaaatgctgtgactacaggtgtgagacatggcaccaagcctgtggccactttttctttattttcacatgagataaagacaccacctgagaaagtatttgagtgtgtgtgtgtgtgtgtgtgtgtgtgtgtagctggggtatggagtcacatgtgcgtgtgggaaacaagcctgaagggttgctttggcacatcacctctgggtcttgccattgcagtgatttatttgcttttctgtattttctaccttaacatgtaattttggggaaattaaaaaatcaatttaagaaacttaatggataaacaaaagacagtcaatactggaaaaggcacaaatcatgaaggtaaacccataggcatggatgtgaatctcagcagtgtgtggtcttgggcaagtggcttgtgcctttgcctctctgaggcctggtttctcacccccccaaaatgggggattatatagtaaatggcaaaagtggctgtaatctttgccacttctcccatcaaaagatagagtttgttttccctccccctgaatctaggctgcccttgtaagttgttttggttagtgaaatgcaggagaagggatggtgtgcttgttccaagtggacctcaagggccttgcagcttctactcactctcttggaaccccgcccagctgccatgagaacagcctgggctagcccactggaggatgagagcccacacagaactaagacaagctatctcagttgaccccattctgagccagccagctggccccagcagacctggaagttgacctctgacaactgagtgagcccagctaccagaagaactgcccagctgagcacagccattagaaataaatagtttgggctgggtgcagtggctcacacctgtaatcccagcactctgggaggccaaggtgggtggatcatgaggtcaggagatcaagaccatcctgtgaatggtgaaaccccatctctactaaaattaaaaatacaaaaaaaaaaattagccgggtgtggtagtgggcacctgtagtcccagctactcaggaggctgaggcgggaatggtgtgaacccgggaggcagagcttgcagctagccgagatcatgccactgcactccagcctgggcgacagagcaagactccttctcaaaaataaataaataaataaaataaacagtttgggggtagtttgttatgtagctaacaacagctgacaaacacactaaacatgcccctaacttatgacctttgcccttgctctttgctctgcctgaaaccccactccctgcaaactccatgggccttttctctctcactgccttcaggtctctgctcagtgaggtctcccctggccagtccatataaaaagcccctctcccatcactctccttcgtatatatcttgccatagcacttaccacctcgcttctttatgtatttacttgcttatttgtttattgtctctcttcccccaacacacacaccatggaatatgagtgtcatgggggcaaggagattctctattttgtctaccactattagcgcccagcacctggtaggggttcagatatttgtggaataaacaagttcatcttttgccttaggggctcccatccagctggccacagcgctctcactaagaagacgtattctgggcacctcccagctgcccgcctggctctgggccctcaatccctgaatgacagtggtcactgcacttgaataaccctctagagtgtaaagggacttcctcctttcctgcaacccactaatggggtctgcagaccccactctccagccctgtttctcaggtgagataactgaggcggagagactagtgcaggtgtagggacacaggtatcttgtggcacatcttgcctggtgctccctcaggccattggacagaggcacctcctcccaccaccaagagctgggccaggcatcagggatccctggtctgagccttttcttctcctaacttgcattgagacctgaacagtccctaacagggagacaaaaaaaacttctcaacagtgagaagcctctgacaatcccagcacctcattaaatagactttcatcatttcatgcaaagctaccaaaggaaagaaaacatcaggggctgttagaccttggccaggggtcccctcaactctcagagcgtcaggaaggctgaggaagaggggtgagggggagggtcccccgcagcctctggctggcctcacccagccatctcccatggcacctcctgccctggtcagaagccctcctgccctcctgggcactcaggggaaatcctctgcaacttgggatgaaaaccacagagcaagagtccctggaattcacgtgtgactgcttggtaatgttgccttagcccagctttccccaagagctgacccaaaaggaagattcaagcagaagcattttgtggggggatggccccaggaagccccagtaggagtgtgtgctaactctgggcattcccagcttggtggagtgtgcccctgccatcaggggtgcccttgagaagagaggcaggcaggtcctgatgtaggatgccactgggtgtgcaggaaggaactgcaggtgactttgggggtccagggccctgaggaaaactgagaacagcactgctgatcccaggggaggggatggagagcaaagggtgactctagggaggcatttcagcagaggagacccatgagaaggggaggaccctccatcttcaggctgggtattgaattttccaagcccacctggctaacgactttgcccccagaggcacttgagcaaagggccagccccagccagagccaggagagcaggctctgcactgccgcaggagagctgctagcccagcctggctacaccatggaagcccaaagacaggagctcttttacagaaatgaaacccctagaattagtccccagaccaatggctctgcatgcaaaggcacagacagcatagactgaaagtctactgtgtgcatagctgcagccaggagatgggcaggggcccataagagaacaccaaggtcatgttcattaagcattcactgaggctgtgcatggcctacctcagcgctcacagcccctcctcctagtggcaactacgactctcccctgagataggaccggtattccaaacacctctccggggcaggcaggggtggcagccccttcactaactggactctccttttgtgctcagagtaacccccctcccattttaccaacgtggaaagggatgagcttcaggagcttggccatggtcaccggtgccagggagtgagacagaggcagaaccctgggaggcctgggtgattcaaacacatcacagagtctttaccctaagggagctgcaatccagccggggaaataagaccccgaggaaaatgagcaagagcagttaaaccgcaacataaggcaataatacaaggaggctaccacccagagccggacattccacacccagcagtcggcctcgccgcctcccgcccgcttcttcttgtaagggcctttctcaagaagtggctaaaaagggacttaggatagcacttggcggacaaaaggggttgttggcccctgctctaaaacatttgccaacacatcttcccatcccctagggctttaagaatgatccccacccttagctagtcagtggctgcaaagcagcccctttcattaagccagggaggggggtccagtggaaactgagcccccgatctttgggaaactgctgaggaggctataaaattagagagaaggacgagcaaattacagagagggagtgggcaggcagcagggcctttcatcagcctgattagctaaggaaagaggcccagccatgggggaggaaggccaggggaggtcgccggctacctcctgggggattgagggcccctccaaagttcaggggcctcagcccaggcttctgccttcaggtcaaacctgtccttgcacagtagggggaggacccaacattttaccgggatgcaccatttctcaccctctgactctggggcctggctgaatctcctggagtctcattctcctcatctgtaaaacagccccggctcacaggatgtaactgtgactgaactaaacaagtggttggttctcaaccctagctgtacatcaggaccaccaggtgaagacatgttaaacctccaatacttaggctgtaccctgtactattgatatcagaatctttggtggggggtggggagggttgggtgggaacatcccaagcacagggacaactggaacagagggcctgcgcaggagagcctggggtgtcctggaacaggtgtggctggatggggatgaaggagagggatggcacaggagggaagttcacagaggtcaggggagctcagctacacttgcagatcacaaaccaccccacatttcatgcaggaaacaaccacaataaaaccaccaccattttattgtgcttgggcttctgggaggctagagtctggacaggccttagtgggaatgactcgtctctgttacataacatctggggcttcagctaggaagatgtgagtgtcttgcgggggcaactgtctaatacagtagcccctaggctcatgtgactatttaaacagaaattaattaaaattaagcaaaataaaaacttagcttcctcaattgcaccagccacattccaggtgcttaatagagaagtgccagacttggctgggcgcagtggctcacgcctgcaatcccagcactttgggaggccgaggtgagaggaacccttgagctcaggagttcgagaccagcctgggcaatacaggtagaccctgtctctgtaaaaaataaaaaattaaaataatttttacaaaagagagaattgccatacttggcagataaaaatacaggacacccagtgaaatccgaattttaaataatcaacaaatttttttttagaataactatgttccaaatattgcatggtatgtattacactatattatttgttgtatggaattcaaatttggcagtgttccatgttttatctaaatcccagctaacatgtggctaacgaccactaggctggacggcacagataccgaacattcccgtcacacagaaagtccttatgaacactgctgctctggagaggtcttcactcacctgtctgcttcctgggctgggaggacgtgaagacggggcttcactggaatgtgggacctctgtatctggcgtgggtcctcacggatggcaaccacattccaagagagtggcccaagagcaaggcttcctccgctctgtacctggaggttacccgccagcgtcacttctgtcctgttctggtgggttacacatgtgccattccagccaacccaggttcaagaggagggggatccgattccttctgatgggaaagctgcaagatcacattacagaagagtatacgggactggaaatattgttggaaaatacaacgttggagttggggacatcaaatcacgtagggctttgtagttgttggaaggactggggctttgagtcaaacagggagtcatgaagggtatttgcagagtagggtcacaatctgactcatgtgcgaagaagattcctttggctgttgcaagtgaataaaacgtagggggtgaaggcagagtctgggagtttccttaggttgtacctagccctaaactaaactgaaatcagaccccagcctagtacttggtggtggagttggcatgacgatcccagcttctggaccctatttccctcttccctgcaacaaggacccttgcaagtagcccctcccctcacaccagcttcacctcttgcccccaattctgaggcgagtcacatctggtcagtttcactcccccgccccctcctatggcgacaagtgctttaacagacagtgcaaaaggggtcaaaagcactgcagacatgaaccagactttagaaaaacacatagcgcgagccctgttgggattcgcagcaggcgtttccaatgtttttctcgagactgcaggcttgggatttcctgtcttctgaggcattcgctgagcaggccaagatcagcttcataggaaggcaggaatggggcttcctacattgctgtctgcaggctctctctggctcctttcctctcctccccttagggtcttttttgtgtattctttctcctacttctgacactttttctgcccccagataaatgtccagccacctgcctcccaacaggactgaatcacgggatcatgatacaatcaacaaatccaaggagctgagaggccccgggagctgcagctgcatccagctggaatcttgaaggctggctctagctacgggtttccaccctcatgcgaagtgtgccaactgcttcgcagaaacctcctaacttcagcagggcagagcaatgggaagctatgtcaagaattgctatgggtatccggcctgatttaggggtaactgatacacagcctaacaccgcacagcaccgttcttattaactgttccttgactttgccctgtcttaggttgaccgtccagagcatgggtcatcccctccctgtctttttgcaatgtagagaggatggggtaaacaacaaacacatgacctccattccctctccaaaccccatcagaacaactggaaaggatctgcaatgtaacagttaaaaagtaaggccgttcataaacagttcctgaaacccaagcagctggccagtctcctgctccatttccttgcagcaagtttcagtggaaactctataccccaaacccccaaatccctaccctttgactgatgcgaaaaatccccccaaacaggcctttgttcctttagctgaggacacaccaaatgtattaatgaacgtggataagagctggaaggcaactatcagaagtggctgtggactaggattacaggctgttattttcctggcctgaatattacaggtcccacaacttaagaagctttaaaggaggtttgtaaagcatgtattaaaaaataaggcaggcccagttgggcagtggctcatgcctgtaatcccgttttgggaggctgagatgggaggactgtttgaggccaggagttcaagaccacccagggcaatataacaagacccgtctctacaaagatttttttaaaaaaattactcaggcatggtggcgtgtgcctgtaatcccagttacttgggaggctgaggtgggaggatggcttcagcccaggagctggaggctgtcatgagccatgaccgcaccactgcactccagcctgggcaacagtgagaccctgtctcagaaacaaccaaccaaccaaaaaaaagaaaggctcaattaaaaattaaaatcctcccaaacagctacctaaaccattcacaacttctagctaatgaagactttggttgggtggggtggttgctgaaggcagggaagaggctgggaggctcagggcctctgtgcttgtctgcagggggccctcacctcttcctcatgggaagcaggccgtggaaggacaaagatgcaaaagagctgttttggggcctcaggaaaactcctccatggatctccacggagagagagaaccaacagcagaaaacctccagaatccaaccccaatgctggcatcctgaatcgttttttgtaaacaattcctattcggataggaaaaaaatctagaaacatttaataacttattcttgagatgtggtattttactgttattttgttttacaagatgtggggacttcattaaatccctacatgtattaaagttagaaataaacattaaaaccaaaaaagtcaatggttttgaatggtgacaaaccaaacctccaataagaaatcactgtgggcagctcacccacgcaaggggcaccttgtgtatgtgcgaggagtggatggggaagggcgtcccctggaccttgcagacccagctgtgtctaaaggacataactgatcactgcccaaatgttgtccaccacccccaacttccttccagacacatcacatggcctggctgtgaacccccatcaacatcacaactgttttgacaccaggctcagatggggagttctcgaacagcatggcctcagcaatggaggttgtgtcttgggtaaccagaaacctgaagcccgcaggaatcctggaggggactgctggtctgggaaaacaccattcagaactacttaactctcaagtagcctgacatttctcttcctgctaccttagctataagctgataatctgagcagctctgcggggataccaggctcctgctcagctgtgggtgggcaggtggctgtgctgggtcgcccctgccgcctacaggcagaaagcggatggtgcaaggtttccttccaaacggaaatcgcccttcacagagctgagcctgggaattaccacaaagaaacctcacaaagaaaaggtgcgcaaggcaaatgttcagaaaacagacccctaaaccctgagatggcacaagtgaatgtgttgggtggtgaactggccaaatgcttgtgctctgtcaccacaaacgaccccagtggtctgacatgacctcaacggcttcacagaccaggggtgtgctttccttcctcgtgacaatctcctaattttgcttttcagagtgggggagggcggggagaggggaggtggatggcagttgtccctgttgtctagtctggagtacagtggtgtgattttaacttactacagccttgaactcctgggcacaagcagtcctcccaccacctcagccctccaggtgtatgccaccactgtaggttagcattttttgtagacacggttgcgctgtttctcaggctggatcctagcttttaatgaaatcgtatgacatgtgaactgtgcagttttgcgtgtgccacgaggcaactttctcagccgtgccttgggcaagtcacagcctttttggcctggatgccttaaggcagcccatctgaaaccacttcccattcccatttctagaaaccttcaagggttccctatgaattgtgcacccacatgggttttcctggaggatcactagttctcagaaccatacaagcacacagcaaaagcctctccacacatcaccctgaagtgacccaaattcccatttctcaatgtgggacctatgctctcctgcactccagcaagatagctgtggattcccacctgatgctgttcctcctgctgccaagtgcctgcctgcctttccaggtctcagcacaccacacaggtcgcagtcagcatctaaacccatccccccaccccagaccactatgaatgcaccctcacatacaggtaaaggtagcaactcactaggtgactgacagaaggggaaaggtgactacatccctgacccagagtgcctcaaatttcctaagtgactgtcaggtgcaatttaatgaaaagccttggaacaaatacagcaggtaaaacatctacaatcataccatccatgaaggctgtattagagattgctggcataaaactaatttgaggggcctctgaagtgctgactccagctcacagatcagtcagctgagagaggcagcctagatcacttggtgagcagcagacccagcactcaagattcatgcctctgctgtccatttgacaaggtttagtctcaagaaaatgcaccaaggccccgaggccaacagccagagctccaccaatcagggctgatcacactggtgctcaagcactgcggcccaggaacctgactgcaggagtgctggctctacactaacagaatgctgggcgtgtgtgggtggctgctgtggacattatgggggagatgggtaggaaggacagatttggttaggagcccagactgaagttacaactgccaagtttaaattcactcattttgtgcaccgtttcccaagtatgtactgtgaaggtagaaggcactgtggccgcctgtaaatagctggggaggcaagacacgaagaccagataaatgttaagaaacatgctccctgtatgtattgaaatcagttctgcaaccctcataccagttggctgtaacagatgctaaatgtggtgggtaaaatgtttttagtctcatggtcttaccatgaattacttattagaaaggtaaaggagattaccaccctaagtgctcagtcatcaacaaaggaatagacacacaactcctgaagacatgtcattggcaccagggagtggtttcgtggaagacaatttttccatggacaaggtggggtgtggaaagggatggcttccagatgaaaccattccacatcagatcatcaggcatttgattctcctaaggagcgcacaacctagacctgttgcatgcccagttcacaatactgggtttgcactcctatgagaatctaatgctgctgctaatctgacaggaggcgaacctcaggcggcaatgctggctcacctcttcctaacaagccatggacctgagactggggaccactgccctatggtaaaggccctggccaaaatgcaaacctccatcaggtcaggagcaaacagacaaacccacatttagagaccatctaaaaaaggcctggagtacttaagaatgtcaagactaggacaaatttcccctgaccgcccccaggactctgggcagaacctgaaaaccctgtaaccacagccaaaccctagcaccacctgcactcctgggacacactctggttgtagtttccacgaaaacaggccgtacattagtagcacgattattttattatatgctttataaaaaaacaaacacccaaagacatacaacacaccgccctcaccccccagcggccattagggagggggcttatacttttcctaatgtagatctggccatcttataaagcagaccacattatttgtttccatatatacctgtagatatttctctcccctcaaatatttatatctcgactaaaaaaaggaggtgcaaagagtatataaagataaatgagattttcttgctgttgttatagtacaaacaccagatgactaccagtggagtaacagggcaaaacaaaaacacaaaccccaccttcagtgaggaatggaaggtctgttaccgacctcaagtagctgaatcacctgctgtaactggcacctccctgacaatcatgggtttgtagggacatgggccaggtgatggcttctacttgtttccagaaggctaatgtgtcctacaccctttcttagtaactaaagacgaactacgggagaacccagtatttggattctgcccagaggtattaaatgcacaaggaaaaattagttatgtccaagtagcaagcaataatatttttaaaccaacatggttaaatgttaagatttgtagaaatcaaaatatttattcacataattttaaactaaagttgaagctaatatatcttccgtggtaatgatttaagtgcaagtgatgcttggctttctttcacattcatttcttttcttctgagtgaaggcatatcagttattcttgaacaagtcaatacagctctgcaaaagggagacattgttctgtggggaaaaaaggcaaggcagaccagtgaattattaaaacttgccatatacctggaatgactcaagtacaccaacacggcttttcacgggaggtttaaagtcagccagagcaagctggcccttctcttcatcaaatcccaggtgaactgcaacgtaccacgcatccccatttcatgtttcagctcctctccctcagtgggtaaggctaccagccaaagagccgacgttcactccagcacctctgccctcacctgcttgctcctaaatgtgatcctgcttactgtaacttcttaagacactatcagtgcgttgttccatgaaggcaagggccttggaaagattgaataaaagttgctagaaattagggctgggagctttagctcacacctgtaatcccagcactttgggaggccaaggcaggtggatcacctgaggtcaggggttcaagtccagcctggccaaaatggtgaaaccccatctctattaaaaaaaaaaaaaaaaagttgctaaaaattagtcatgggtgacattataaacaagactacaaataaacaatgagtggctcccatcaactaagtactacagacgattaataccacaaggccaccccaactgcctgatgacaatgggttagtaaactgggaaataacttggaaaaaaccataaaagatgttggcttcatctgtagaaaacacttaccctggcatgttttatttccagttcagacatttcaattagattctttctaaatgctgccactctcttccgtttgaaatttatcagttctacaggaagaaaaaatgtttatgaaaccaagaaaaactaaacaattttcatgttcactttaactaccaaatggcattcttacaaatggtctccaatgctttcaggcaccagcattatttcctcacatttgtattatctctgtgactgggacacatcagacatctattaactgtggtgatacagctatcactgtctttaagtggaaaacatcactgaatcaccaagcatcgtgagtgggagagcagcagcttatgacttggagaacacgttgatgagcagcctcactctcaccctctaggtaccagtgactgggaacagggctggagtatgggtggtggtgagccacatacttcaccaatggcttgtgaaaatgcttctcaaaagaagacataccaggttcatgcaaacaacgttcagcagcactagccattagggaaatgcaaattaaaaccacaatgagattacctcacacctgctagaatgcattttctcaaatagatgaaagatcagtgttagcaacaatgcagagaaaagtgaactcttctacaccgttgctgggaatgtaaattagtacagccaccatggaaaatggtatagaggttcctcaaaaaactaaaaatagaattaccatatgatccagcaaacccacttctgggaatataaaaggaactgaaatcagtatctcaatgggatatccgtacttccatgttcactgcagcattatttacaatagccaaaatacaaaatcaattgagaattatccatcagtggatgaagacaatgtagtatagatacattatactatccggccttttaaaataacaaaattctctcatatgggacaatgtggatggatcttagaggacattatgccaaataaaataaaccaggcacagaaagacaaacattacatgatctcacttacaggtaaaatcttaagttgaactcctagaagtagagaacagaatgatggttatcagaggatgagggtggggtgctggggaaggtgggaaagagaatgggtagaaggctgcagctaaactcaaggaataaattttgagatctactgcacaacagggtgactacagtcaataatatatattgaaacagcaaatttcaaatgtattaccactgaaaaaaatgaaagatgttaattagcttgatctaataatttcacattatgtacctgcaaagcatcacactgtattccacaaatgcaatacaatgacttgtcgattaaaaataaaacttaaaacatttttaaatccaaaacagtgaaaaactgctacacgtattcaagacaggtttacttgatgatctttagggcatgcttccttttcatctactcctttttctttttttttcttgagacggaatcttgctctgttgcccaggctggagtgcagtggcgggatctcggctcactgcaagctctgactcctgggttcacgccattctcctgcctcagcctcccgagtagctgggactacaggcgcccgccaccacacccggctaattttttgtatttttagtagagacggggtttccctgtgttagccaggatggtctcgatctcctgacctcgtgatccgcccgcctcagcctcccaaagtgctgggattacaggcgtgagccactgcacccagccctttttcatttcatctactcctattgccatcagaattcggcattaatgacccattggaaattggaacaaaccaagaatatgcatgtccgccctaattccttcattgaatttgtgacatcaagttctgtcttgcagttttacttgactaaaactttgaccatcacccaaccttctgctggtgctcaagtgttcagagcagactcaccctccttcctgtctctacagtgctgtgcaaaagaactacaatacaagcagccacatccaagttaaaaagtcacaaatttcatagtgatatgtcaagtctatagtgcttgcactacaaggtgatgtttatcagtcccttggatatcctgggtgaagataagctccctgccttcctctagacctacacacagtaccagggctccatacacttaactattcacctcctgtgaaaccagcccttacccactgactcaactctagtcgtcagctcagctgcaagtctcagaaagcacttataccaaaggcaaacaggttaagacccaccaatctcagcattccacagaatactgtatttttagatagtgtacctatctggcattttgaatataggatataatcaatgtgggcgaaaactttaggcagtaaaggtagacctgaattggcatcattttttaaagttttatgttttttcttcaatctcctctaaaatttccagagccatgaaactggcctataagatttcaactcagtagttttgaagtgtgtacgtttccttgaaaattttagttttaaaaaaaaaaaaaaagctgtaattgtttcagaaacagggtagcatgaaggttactttggaagaacccaacacagcctcagagcctgtctacatgacatttgccaggaagctctgtgcctttgtgccttacagttaaggcattgtattataatcctgaatagacagacaaatgattagaaatctataaagtctaggtttcccccaggtagcttcaaacatgttgatgaacacatcatttccctatgtctagattaccctaccactgggaaacaagaaagttaggaaaaaactaagtaagatatgaatttttcatggaaacacgcgttagggggttgggattgagtccaacagtgccccactacaactactcacattctgggtaatccattccaacatttgctctgacatgttccatggcccctgagaaccccagagaagatccacagaatcctcttaggtaaggactacatattatactcatgttcaatagaaatggtgaaagtcctctgctctaagaggtgaaatggataaggcaagaaagaaccctatggatgtggacatggaccggacttgtgatccctgaaacctgcatgtgtgtgcaacggcatatgtgtgcacacacacatacatttcctagctcagtccactgaagggcacagaagcagagataccccgaaacgatgagcatactcagatgctggtaactgttcccaaagaaaaagaaccctggctccttgaaaaaatggccagtttcaaggctggagcagagagtaagattagcatggcctatcactctaaaaaagacgggttaggctgttacaaccacatgccagcttaaaggtgctcctattggcaaagtctggacaggcatcaaaaataacttggtaatacaataatgaattctaaaccattttaaaaactgggagtccatgactctaataaagataaaggaaatttctgagaaaagggaaggcttttttgtagtaggatgacaagtgccaacttgggtaggaaagctagagctagagatgagggaaatcgtctttctgcaatcgtcagagtaacagctggtttaggcaagaatcattaatacatgctaaacctagggaggaagtttgatgaagaccaaggtatttgcatggtcttaaattgcctcaccacagattgatgggggttaaaatagtaactacacagtggagaaactggatttggatactatctaattgagtaatcaaaattaccaccacgaatgaaggagagacacactgtccaatcagaagtgacaccccaataagggcatattacttctattctgccaggagcccataaccagatctaaacatgaggaaacctaccaaaagtcagaaatacaggatttgtaaagagattctctaaaaagactgatactgttaaaaactaagaactattccagagtaaaggagactaatagctaagacaaccagatgcaatcctagactggatcttgtagaggacatcaagacaaacatgaaaatacagagagcagattgtagacccaaagttaagtttatcacagcaaacaaccatactgtaaccatacaagagaatgtcttcagtcttaggaaataaaccacaacgtttttagggctaaaagaagcatgacatatgcaacttaatctccaatggtacagaaaaaccaggtgtgtaacgtttgtaagcacgcaaagccatgaggatgactgtgcatgtgcaagtgataaggcagaggggtgaagtgctgacactgggtgaaggatacatgggtgttttttgcactatttgtagaacttttctaagtttgaaattattttcaaattacagtacagaaagaagaatgtcctgctcaaccttcttttgcagattcggaaagttgttcaaatttctggcagcactcctgctggtgtgcctcagccaacttgacgtctttgctctttaaccgggccttatccagagctttgtttgagttctcatagtcaatgagggctttggtgcgtctgtataagagatcctgggaaaaaaattaacaggtatacatactaagtatctaaaccagtctaaaaaatagcccaagtgccaatgtaccacctgagatgttagtggcaataatctacctctacaccttccctctcccagagtatttttaaatctccagcttcgcagggatgagcaatgctgatagctttgttgagagctttttttagaattccttatatgaatcaagtgattactcaagagtgaaaacagaaggacttttgttttccagtaattcagtaaataaagttaactttaaaaattaaatattgtgtatcagagataacttgaaatatacagtcactgctgggtaagtcaagttgagcgctgctaaaatacaactgggcaatgaagtagtaagaaacataaccctaccctgcaaatcctgcttctggtaatctaccttggagatccacttagtcagatataaagattctttgcaatcttacaacagagtagaagttactttagtatctgaaatgagcaattatgatgtatagattacacatttaaaactaggtgaaataataactgatgggtgaaactactaggcctatttttgtatatactcaaataatcgtaagtgagctcttaattccatgaaagtagaaaataggctattaaaaaagtatgtttttaaaaactcccaagattcagaaaacatgccaaagggcaaattaactaaaataaaattgcatgatggggggaaaaattttttttactcttttactttctgatgacatttcagccttagagggcatacaatcctatctaattttattttgcctgatttaatacatttcacataaaattaaaacatatttgttcagggcaatgcagacaaagcatgtttcattcccaaaggttattctgcttaccattttgtccacatatacatataacgcttcacggctcaaaggctgcagggatacttgcaattcaataaaaactcccaaatcttctttgccccagaaacagccctttctgcatgttatgtcccacatcaatgacctataatcccccaaactattacctgtctacttcacacaacccatacagtgctgtcagatacacaagctttatggatacaatgccagaaaggcatgtcatttataaaaacaagtctgataaattcttattctgctcctttgtataaagaaactttttaaacagacttctggtcctgcactgctctgagaagctgagcaactctcttcctaccttagcagcttcaatgttgagcatgtagtatcggaggagctctgttagcttcaaatcttcatctgatgaaactcgaccctctactttctatatagaaaaggaaaggtcaccatcaaggcagaaagctatagattataaaatatatattatgaagaccaacacagaaatccttacccttagtttttcaaatagctcagcaaccttcaataggtacctggaaatgtacatataattttggtttaaggtcttaaatcatctataaaacatgatcttaccagtgtgcaagacaggaatgggtcaactcaggagtcctagcctttggtactttagcattaatttaaaagtagtgctctcacttcaactgaccccaaatagtagagaaaatggtcacaaaattacacacatgtacagcaccacactcagcctcttggtgacccttcggtcatcctgccatgcgcccaaatattcttattaaatgccaatgctgtgtaaaccaaggttggtttctaatgagctatgctatgggcatcacaaagcagtaaatatgctatttaattcgtcatggttctgccattagcctttcaatttcgagtcagaagtagtatcacctgttttgccaagcctggatgttaagtaaaatattgtcttacaccagaaatgcccaggatggagaaactgaaacacatacataagtgcagagtgaaaatggaagggtttttaattaatgaatgaaggtaatttcagaaaattgtacatcaaaacagctgtgtgttagactggggtcattaaattattctcatgaccactataaccaaatctcttcaaggtccagggcaggggcacatgttctcaggatctcctgaggctgcatcacaggccaaaaaaaaagaaggtctagggcattaccaggcaaaattgcaagcaccaattgccaggggaagatgcaagataaactcttacaaactccaaaactaaagaaaacaggcttttaagtgtgacagaaactactgctttgacaacatttactgtatttgtttacatatagaagagcccaagtcccctacaattgtcttacaagtgtcttatgtccagagaacatgtaagatgagtgctagagacttgtcttactgagcttgtaactccagagcaggaccatgtagtcactactcatttatgcttttaattacaccactcggcactcttcaattgggttaggggaaatgcttttccaaaaaaacttactttttgatgactgtgggctcttctaaagccaggctatgtaagcaggctgcggtgtggatatagtcatcggcaacatctgcagaaacaaggacaagtctttttatccaaacacagccaggctcatcagcaaagctctgactagcggtaaatgatatttacttttatgagatctggtcattttgtcagctttcacacaagaatctttgatcctattgtaatagttaataaggaagttcttctcttgctcaaagaagtcatctacctcctagaaggaagaaaaaaagaaccagacatttcatgaaatatactatccctgcagccttttacatttatcaatataaaaatatattgcttagaacatggcatataaacgtgagtaaagtttaacctctacagatcagggaattacaaatttacgatactatttcttaaccaaggctgggaaaaatcaagggctggcagaaaatgtctacagaagaatcacttaacaaccaccagtaaaactggcaccctaagacacagcaattttacgctagtacaatggttctaccaggtggaacatggccacttagccttggatacctatctgtgtgtgaatgaggtttttttttctcgattggtttcagactgggaggaaatcctggtatctggtaggcattggccaaggatgccaatgccaaatatcccataatgcatggatacaggacagtcccatacaccttaaactggaccaagtccgagtttcctaatttctgatgatgccctctctacttagcacctgtattctgggctccctggagtggcaaagccagataccagacagtaattgtaagggtaactcagttacaaaggaatgagaaggcccgagaagtagtaaagtaaatcatacctctaacggtaacggaaacgttattttgtattcttgtctttgtgctaacgccttgaaatccagtatgtaaataaaatctaaagtttggttccttagttgtgccagctaggttgcatgtcaagtgcttctctatcacctgtagttggtgaccaaactggacagtgtagttctgagagtgggataaaatactgatcttgtactttattttagaaattaactgagtaatctccctccttacagaaaaggagaaaatgaagccaagtgtggaaaggttcaagttgcttctcctgggacagaacaaggtgctctgggaaataagtgaaaattgaataagtagatgaaaattaccaaaatctgaagaacacttacatgtcttaaaagttaaccatttgtttcacaagtatctctttcaaagaaacaaaaggtcacctattcccgatgaagtaaaaaattttctccaacagccaaaggtcacttaccttaactccagtaaaaaggacttcatcagcacttttcaccacacttttgaagaagccaccaaacatctctttagtatttttccgcctaacacttagctaaaagaagaaaattccaaagagtttatatggtatggatttttctagattctcttaaagaagttctgagtaacattttaagtaatcctctttatcagtacaggcaaatgcataaagtatctttaattctgccttaacctccaagcttaaaacacctaatggctaaacccaaacataggtaggtcatctcattctaaaaggcttgacagattttgaaagactgactagaagctaagtcttagtggctctgaaatccttgggaaaattactgttctcttctatccatattaagtagcaaaaaccaaaacatgttaaaaagaaaaatagcataaaagtcataattcgcggccgggcgcagtggctcacgcctgtaatcccagcactttgggaggccaaggcgggcggatcacgaggtcaggagatcgagaccatcttggctaacgcggtgaaaccccatctctactaaaaatacaaaaaataagccgggtgtggtggtgggcacctgtaatcctagctactcgggaggctgaggcaggagaatggcgtgaacccagaaggtggagcttgcagtaagccgagatcgcgccactgcactccagcctggatgacagagcgagattctgcctcaaaaaagaaaagaaaaaagtcataattcaacaaaaagcgtaggtgggaagaaaataaattacacaaattttaatttccttaaaatgaacttagttaagtttggaattgttaagaaattaactaagggatgtttgggactgttaatttcttaaaaagaaacctaggttttggaaggggaaagaagtcaaaattttctttaagcagagttttacaaaaaatgacttacaatgaaggaaaagcagcatctaaaaaggtttccattgtgtaagaaattcaaaactttaaagcagtagaaactatcaagtacattttgaaagtataaacatttgaagtggattatcaaaatggaataaaaatgccttacatcctgatcatattccaggaaaacatgaaagttgcgatctttactgagaacagggtgagaagaaagccgctgaagaaagacttcatgggaggacacagtcttcttaaacacagcgagatactcactgaaaagagatgtgcacatggcattcagttgacacagctcaactacctgaccaataccactcctgattaattctatggccctgctcatgccaccacataaaacactgcaactggaccaaacagtatttcagtataaactggtgtctagttagatactaaggcagttgccatttttgaatctgtggaataagactatggaggaaagcaatgttgtaactggatttgatgggtcaagtccatgagctcctaaatctacatgcaattactgttacttagtagccacagaacatttgtttctttaaagcaatgagaaccctttaactgcagcctaagtatacagcatgagtctaatgaagctaaaagttaacaaaaattacaaagcagctttatctcaacctagacattaaaagtcaccttaaaattcctaacggtagaaacttggatctgttgtgttcagtgcctcattccccagagctggtcccgagagccactcaagtgtgtgctaaatgctttcagggcctggaggtttgagtgctgccctagatgacacaggggtttggagagggggagctgatggttgaagaggggaggaatgagtacttttcagctaagatgaggaaatgcaaggatggattcataagaaactttccaaaaatctatttttgtttgaaaaaattaaatgacaaccagattaaaatatacttgctgcctgtagacctggacttcctctttcaaattatctatgtgatggttactgagaatgctactctataacagcactatttggcctggcccaggggcagctcactataatctcagcactatgggaggcaaaagcaagctgatcacttgaactcaggagttcgagaccagccggggcaacacatgacgaaacccccaactctctagtttcttctcaacgtctagtaaccaagcttccgaaagaaaagctttgtacattatgagcaatttataaaggcacaaaagtttatttcctcactgtgccagaccagcatccttaataagtatgccctacatatgggaaaagacaactactctatcgggtattagtgtcaatggcctccaatgaatcaatgtgtgaagtacaaagaccatgtcccacactatgcaagatgtattactagttttagaaaacgacgctagggacctaattaaacagctgcacttaaaacaaaattaagtcaggttcttctacttatttttgtacacagcaccacttttctacttctcaaaagacagagcccaccaggaaaatccacttacgcttccagttcttgtttcatcttggcaaattcttctttggtcatagacccttcaccttctcccagtttctgcatcttctctcgaggaccatcaaagtcgggcttcgtaggagcaggtggaatctgcagcagaggcaggaactcatgagcctcttgtcccagcagcgatgttttctagttggtgcctcattctactcttgctggtccacaggagacaaccactccactcctgtggggctatttaaaagtcaactcctgttttttcttaaccttccttaactcttctggacatttaaaatgaggtgtcttcctgagagttgcatattcactttgatggcaatcatttgttcagtttatccattatagacaattgttcagagcacaacagtgtctatactgcttcagtgttcgcctaaaactagtacaacgaatgctaagcaccaaagatgagccatcaagattataaagtgttcagtattccaaaggaattttttcctaatcccaaaggataatcaaggactctaattttgaatgaaagacatatctaaatataagcttcggtattaattttgtttaatgattaagcaatcatcatttggagagcttcttcagtctgcctggcaggacaaaacgcgtggaaatctcctttaaaatcagttaagtctgttcctgccgccaagaaataacaatcaagggctgaaaactgcctccttgagcactttttttgtttttgggagaaagagtctcgctctgtcacccaggctggagtgacgtggcacggcctcggcttactgcaacctctgcctctcaagttcaagcgattctcatgcctcagcctccccagtggctgggactacaggtacgcaccaccacgcccagcaaattttttgtatttttagtagagacagggtctcatcatgttgcccaggcacgtcttaaaattctgagctcaggtgatccacccaccttggcctcccaaagtgctaggattaaaggcatggcctccttcagcaacttttgagaaatcttatcacaaactattaccaatagcagtgtttcctagaaatcaattctactgacataggaaaaaacataccagagaaaaaccaaacctaaaggtaggtaagactaaagtcattacactgttcacacccctttacaatgtaaataatgtaagcctgtatgcaccacctcaaagctgtaacactattccttcacatactttccacttgacagtcagcaaatactccagtaggtagatgaaatctaacttttcacaatccattaaaaaaagtggatataagtctcttttaaactaatgcatagcaaggcagaaagaactagcttatttgattttctaaaagactcacaataagcccagcatagtctgttgtttcaataagagtgtcatgtagccacacaaagtcttcatgttgccttgtaacagaaaactctgggctctgaaacgtgggcagtgtggtctgtaaagaaagaaagaagttaactggtaaccacgacttttagataagtgatctgggtttcctaggctacacagtgggaaaattctgcataatacatcataatatgatccagtaaagaacaaagcagttatacatgatctcctgtcatgaaagtcatagctaagattcaacctgaactctaacgatttctccccaaactccacctttctgaagcttgtaatgaatatcccatcagaatctactggtagaagttcagttctaagaaataagccacaaccctaattctatttttttgtttctgtgtacttttttttgtttatatacatttttgggacagggtctggctgtcacccaggctggagtgcagtggaatgatcttggcttcttggctcactgcaacctctgccttccaggctcttaagccatcctcccacctcagcctcctgagtagctggaactacaggtgtgtgctaccacatccggctaatttttatatttttggaagagacaggtttttgccatgttgcccaggctcaaacgatctgcccatcttgtcctcccgaagtgctaggattacaggtgtgagccacccaacccagccccaaattctatttttgtaagtctgaatttaccccccacccccaacttatgacaaagaagaaaaataaattttaaaaaaacctcttagctgtaacttactatggttctaaaaattgtccctggcttccttccttttcactccagtgaatgctgattttacctcctttgatctggtaagctcaggcagagaattatgtcaccagtctttttacactacctccggaataactgaagtgtgctattcaagccgcccaggcgttaagaaaaaaccacatgggaaaggtctttcccaatttagtaaatgctgaaaaaaagcaagctacagagacaaacttcccttggatgcaaattaaaaacaaagctggggcccggtgtggtggctctggctcacgccttgaatcccagcactttgggaagctgaggcacgtgcatcacctgaggtcaggagtttgagccgagtgtggtggctcaggcctgtaatcccagctactctggtggctgaggcaggagaattgcttgaacccgggaggcaggggctgcagtgagccaagatggtgccacttcattccagcctgggcaacacaatgagactgtctccaaaaaaaaaaaaaaaaaaaaaaaaaaaaaaacaaaaaaacaatgcccacagcccagggctctgccacagcagaatgctgctgccgccacaatggcactcacctgatgcttactgtgagatagattagggaggttctcacttaatagtgctaccctacgaatagcaactgtttcaagctcagggaatctcttctcacatccactgtgaataacaaggctgcaacctagcactgtatgtattaccactgcatgttacttacctttgtgtgcactgtaaatttgactttgtctctctcactgagcgcatcaggtatgtcaatctgaagcgagggatcaacattcaggtccacagatacagatctcagctgaaatacattttttgcgtattagtttcaaactcatttggccctaaaaaattattccaaaaatgagtagttactaaaaagcagtttatacatagatcatttagaaatgtcagttgagctgggcgcggcggctcacccctgtaatcccagcactttgggaggccaaggcgggtggttcacagggtcaggagatggagaccatcctggctaacatggtgaaaccccgtctctactaaaaatacaaaaaattagctaagcgtggtggcgggcacctgtagtcccagctacttgggaggctgaggcaggagaatggcctgaacactggaggcggagcttgcagtgagctgagatcacaccactgcactctagcctgggcgacagagcgaaactgtctcaaaaaaaaaaaaaaagaattaaaaattaaaaaaaagaaaaagaaatgtcagttgagacatttctaagtttatgtgaaactgaggggaaacccattcttcacatgcattggtatatccgaagtattcctgtaatgtaaacaacagctacaataatgtcatgtacaatacatttggccaaatacctgactgtacactaaggcctgaactaaatagaacaaaatcttgaattcttacataaatgccaaagtacaatgaacattcaagaggcattaaccaggccacacaaatatctgaaaggaaaacctggggagatggcacagagaacagtcatgtggaataggatcctgggtggagagttcagagtaaacctgggactgtttcaaatagccaaggaatctagacaggaggggtgaattagaaaaaccaaccaaggccttacttaattagcacaatcccactgtggttacacatgagcaacaagtgtgagcatcactctgaatactcaattaactgattttctgagctggaaattgagaggaaaaaaactacctaactccatttctgcccgtcaaaaaaaaaaaaaaaaaaaagagaggagagaacagtggcagcactaataggaactgggctattagggaaaagtgacttaaataaaagtacattaaagcagacaaggtggtggtcaatctgaaaacctgacacacaaggcacgaggaactcatagcgtaagcatctcattgccccattccttttactgtaaggagtgctaaagtaaagttgtcataacactggattacccaaagcacggaatgccaagtgaagattacaattaagaagatgaggtatttcactccaaatttccctttgggtccctttcttcaaaataaaaagttcaagactaaaaacttatgtacttaacctctaaaacttgaaaatctggtcaatcagctataaaaagactaaatatattcactaaaagcacatggattacttaagtttcaagtactccctttttccttaagcactgtatatttataattctgaaagccagagggagcctattacaatggctttcctccaaaaaattaagctcaagtagtcaccagaagttgattttaacatcaactattagtaagatcaaaacagatacttttgagtcctcacatctcaacctaagtatttttcttccacatgaattcttgataactcctatgaaatatctgcttgtctggcttaattttcacatgtccatttgtgagatctctgcaaacaaagataaagcttcaaggtctgcgacttcatttgatcataactgactccagctttggcgtattttctgataagagcttccttccttctgctaagttaacactggcaaatacagcctttaaaaatacctcaaatcattaactgagatgtgattgcagaggctataccaacgactctactgatcttaggcttatctgtcaaggtcaggcaggcccaagaacaggaataaacagagccaggcctaagaagtagccatggtctctggaggagacataggacagctcacaggacaggtctaaggtgcctttcccagagctcaaaaactgccacatttcctaagattccatttcctaaagtcacaaaccctgacttctagcactgctcaaatgaatatgctgacagttccattttcgctcacaagcccagcaaactcagtgagcctgtgaactccacatgggatacccttggaattcgaataggaggacccaagggggatgtaatcaagtaaatggagctcatttgtgcaccacagttaaagctgcaatggatgctaccagctgctttagctgcttttcgttcctctgaataattatcttctcttttcgtccctttccccatgtagaggtaatacccccgactatacctgtcttcctttctggttagtatagaaacatattttttgtttcagaatgtgatgaagacaaaaagaagaaaaccactaggttatgagtgactgcaaccacagcatatcaaacatccgaggttcactagcagccattttgcccagacatttcgccctaggaagggattcaagcaaaactccaatcacttgacatgacagtcctaaccaccaaataagcaaataatgcaatgttgtatttgggccttaaagaactgtctaaaagagagtattggcaaaacccctcagcatccaggccatcattaactcaatgtcccccaggcgcaagttaaatgaactttctcatattatagcatataaccctccagatgagacaaacatgggtagaaacttgtgaaatgactagagcttctaagtcagcatttgtactctcactcgggaagcatcaagtgtgaccaaaagttcagcattccttctgcttagtcaacaaacccactccacagtgctacagaacttgctaaataattgccaggctccactcttcccctctcacttgcctctgcctccatccccccttaagcttgaagggctcagagtactccttagccctgctggccaacacttgagtctctgacttaggccacagatgttacaatgcttacagtggccgtttacaacagttaacaaagcaggctttagaaccaagtccagccttgggcatgccggacctttaccatgcaaagttttacctcttttccagatcccttaggtcacttgtaagaatcaaattgaaaatatacctactctcaaataatttaagttttaaaactgacttctggctgggtgtggtggctcacgcctgcaatcccagcaatttgggatgccaaggtaggcagatcacttgaggtcaggagatcgagaccagcctgaccaacatggtgaaaccccgtctctactaaaaatacaaaaagtggccaggcacggtggctcacgcctgtaatcccagcactttgggaggtggaggcagctagatcacaaggtcaggagatcgagaacatcttggccaacacggtgaaaccccgtctctaccaaaaatacaaaaattagctgggcatggtggcgcacatctgtaatcccagctactcaggaggctgaggtaggagaatcgcttgaacccaggaggcagaggttgcagtgagccgacatcacgcgactgcactccagcctgggcgatgagagcgaaactccgtcttaaaaaaacaaacaaacaaaaaaacacacacaaattagcctggcatggtggcgtgcgcctgtaatcccagctactcaggaggctgaggcagaagaactgcttgaactcgggaggaggaggttgcagtgagccaagatcgcaccactgcacttcagcctgggcaacagagcgagtctccaaaaaaaaaaaaaaaaactacacataaaaaacaaacccaacaacccagcctgagcaaaacggtgagacctcatctctatttcagaatttttaaaaaatttttaaaaacctgacttttgtagatttcccttgaaactactggatcacgtatccaaagttttaggtaaagtttcagttcatgatgtacttccctaccaggtcaatccttacaatacggattataatcagccttcacggtaaacaagcacggcttcatttggaaagcacattttcaactgttttaaaaaatcgcagtgcttttggtaagagagccaaggcacttccctaaaaggagaaaagtagttacggaatccctgtgcatttcctcacctattcatcagcttcccagctggggcacatcagacactggctgcaggacaaccctgcagctgttgagctcctgcccaccagtcttcataaactcacttttggtccaaatttcacttacgactctaccagcaaagctgcctcttcaaaaggtttaatggcttacagagggcaaagggcacctggatgactgaacaacacaaaaggcaagattctaaaactcagaacccaccaggagaacagaaaaaatacagttttttctaagtggttatggtgactgcagactcagtgccaaaatgaaaaagacacagtccaaagaagtgaaactccacaatctctgatctgttagattggggctagttgaacagtcatttaaatctaatagtcatttgtatacaatgtaagacatggatacaatatgcagtgctagcctgtattttcctatttgaatatcccacataaattactacagataggataaaaaagacacatatctatttaaatgacttcctagtttccattccaaaagcagaagatatgtacttaagcagcacatgctacagtgtcttctctttcaaactatctgttcctagcctctagggattttgttttgttatgtttcattccactgcctaagaaactaagattttgccagcaagagggccaatatgacaaatcatcgatgattcttagcatggagccaagaagcctgcctccttgatcagattttcagctggaaagatatccacaccttgcctagtccaatatttgttaagtgagaatataaaattcaaagatgttctgtcacactctagatttgtattaatgtccacaaatattaaagattcacatgatacatatttaggaaacacatgctactttgttactgtttgaactctcaggaaacaatgttcccattggtgctccgaattgttactattctctgccatcctgaagataactaatacgtacctatctgtgttcaatctcagctttagattatggcactggtgtgtgagaaacaactggttcaactaactataagcaatatattaactctgcttttttttttttttttttgagacggagtctcactctgttgcccaggctggagtgcagtggcacagtctcagctcaccgcgacctccacccccggggttcaattctcccagatactcctgcctcagcctcctgagtagctgggattacaggcgcccaccaccccacccagctaatttttgtatttttagtagagacagggtttcaccatgttggtcaggctggtctctaactcctgacctcgtgatctgcccgcctcagcctcccaaagtcctgggattataggcgtgagccaccgcgcccagcccaactctgcttttacaggtattggctctcattccctagccattggttctccccttcctgtaattcaggcctgcaatataatttcttagtcccccaaggaaaacagaactaaagacttctaacagaagatctcagtctactaacatagctaatagctattaaagctactcaggcatcggcttaataaaaaactaaagggctgcagcaagtgatcagattttcaccactcatctttgtgagatgggtctcagagggccccgtccctgctgacaccaaccattcttaccggtagcctgccaacacacaagcagttcacagtagaacactgcagactgcagggcattttcaggctacatagcctcaagttcctagaacaggaactgaggcttggaagaaggtcagtgcagcgcactcagcgaatggataaactgaatcatcatttcacaaggctgcaagcccatgtactaatggaatcaacatggaaccagagttaaattactgccttaaatatctaatgcatgtcaagaaatccatctaattactaagtaccgaaattataatactttcaaatgaattcacaaagcaaaacagctgaactaatgatctgtaaggatctcctggcagataaatcctactgggaatcaatacaccactgctaccaagaaagcaggtccaacaaatgaataaaagaaacccagccaggcagagaggttcttgtctgtaatcccagcactttgggaggctgaggcaggaggatcgcccgcggccaggagtttgagacaagcctgggcaacacagcaaagccttaaaaaaaatcacctaggctcggtggcctatgcctttactcctaacactctgggaggctgaggtgggaagatcacttgagctcaggattttgagtctgcagtgaactacgatcagaccactgaactcgagcctgggagcaggccgagaccctgagaccctgtctcaaaaagtaaaaaacagaaatgccagtttcctttactcagagctaaaagccttcacctactacccaatcccatcatggctccctcccaaaagttcactggcataccatatcaagtcagcaagcccccttttttgtagcagggtctcactctgttgccaaggctggaacaagccctcttcaacaaagctaagatggtccatattactcatgtggatgagggtgttgaaggacatttactgccttccttcatggtctcacttcatgatcaaaccaagatgcacaggaaataggtttgacaatttacctttaccaagaaagacgattcagcaacagtggtagagctgcctgtttgaacttaaccttggtcatctcagtttgaaatacaaatggcagcatggagagcaggctgcccgctttttggttggacatttctttcactcttgagtttgaggtacagcaaatttcccaaatcattcagatgtaaatattccaatactcagaccaggggcccattcaggaggctgagtgcaggaagatggcctgagctcaggagttcgataccagcttgggcaacacagcaagactgtcttgagaaaaagaattctaaacaaaataaatacaagaattcaaaacaaaattcatgaaagatataggaagggtgagggaagaagtccaacattttatcacccaccagctaccaagtatctaacagcacaatgtcctagctctgcggtgctcttgaaagaaaaagtgaaaaccctgacaagggagccatctggatttgtattcctcaccatttaccatgactagaatgcttaggagtgtgcccttcagaaactgagcttttcaggcagaaaattagttttctctccagaccatataggaatgcctaaaaaagttatgccaaaatgtaaaaagaagagtcaagccaaggacccccatttttaaacttaagtgttggctgcccctcaaactgcaacttactcctcctggggtactatggtttgcctttaggcagcatgtgaaggtgtgaagatctcttttaggagatcttgtcagagtacctcaatggccaatcagaaaacaggtattaagggtgaagaagccactttttggaaagttagatcatgcagagaaacttaatttacactttaatagccgtttctcactattgggatcattaaaagttagactgtttccttaaatactatttaacttcactacacactgttgtgaccacgggctatttaagacattcagggtactaacctatagatctgttctcacctaatttgctcgagcatcaagaccctgataataaagacagaaaaatgctgaaacagcagaattttaaaccaagttcccctctgcagcacaagaaactcaggtaagtttccagtgtccaaagcctacactcacaaacacaaacacgaagccctccctttgcaaccctcaagtacccagaacctgctgaagaaaaccatctttcaccaccttttgttaaggttcctcagtattagtggaaaagctttattctcacaaagatatccaacaatgctaatttttacatggcatgttatttccttaggcaagattaatagaaaacctgaaaaattcgcaacaagcacacaaagactagcttctgtaacacaacctgaccccacccatatcacaccattttagaaggaagtccgtttaaaccagtgattctcaaacaggcaattttgacttcttatcaccatgggaggggaggaggccgcgtcctagcagaggccaaaaacagttgcttcacatcctacaacccagagggcactcctcaacaaaagtgatcaggctaaaatgtcaacagtgctccccaggttgagaaactgaattttaaactcaacctctagtttagatgaccactaggtctcaccgaatgaggagtttacagctcagaaacaaatctagaaaacttaacagccttggccaagcacaatggctcatgcctgtaatcccggcatgttgaactggatggtgaaaccccatctctaccaaaaaatacaaaaattaggtgggcatgctggtgtgtgcctgtagccccagctactcaggaggctgaggtgggggtgatcacctgagctccccaggtcgaggctgcagtgagttgtgatcgtgacactgcactcccgcctgggtgacagagccagaccctgtctcaaaaaaaaaaaaaaaaaagcctcttggccatttctacctatggccaaaataatgtgaacagataatgaccttttagagtattcacaaatggggatcttaagacaccgagtacaagttactgaactagaactaaggcgtgggaagcttgatacgtcatacttcctcaacttagaaaatagttgcaagggtagcataaagcttcagtccacaaagtttgtaagtttggacttgctatggtattggtcaaagttcaggattgttcctatactaaccaactgcactccattctagctaatggagaacaaaaatacccctagaggcagcttccacaccagttaaacacgaaaccagagcagcagtacttagtctacaaacactcctgagtaggtaagaggacagatatcattcaccaaagtccctgtaaccaagcagtaagttaaggccaagttgttactgtcaaggaaggagaaccccctagttaaaaatagcactaggctgcgaaggtcgagttcaaataccagcctggccaacatggtgaaacccggtctccacaaaaatacaaaaattagccgggcatggcggtgagcgactgtaatcccagctacttgagaggctgaggcaggagaatcgcttgaacccagaaagcggaagttgcagtgagctgagatcgagccattgcgctccagcctggacgacagagcgagactccgtctcaaaaaaaaaaaaaaaatcaaaaaccagtaaatagaggaccagttaggaaccaaattaaccatgcatctcttcccctgaactattttctgaggaagaaggcaaaccccaacaccctcggctaaagaatgtaacaaaatgccagtgtctggctaccagacacgactgacacagtattccctttcagttttgctgaattggccaaaatgagtattgggctagaattcaaaatcctgaagaatcaagtatgtccccctaccttagtgagtcttaattaactccatccttagggagaattccaaaccaaagtaaattatcaggagggcatttaaacaatttaagtaacacacatttcaggtaacacacaaaacatttcagttgactaccgaaattgtattatggcaaaaagttgcccaagacttagtttcccattatttcatacttgccccaaactccctttcagttaaccataacaccatctaggccagaccacagcaggttatcagcatcagcagagatcagaaaacaaaaataaagccacgcgtcagggtaattatttatttttattgtctctttattcctgtaatgtaaaaaggaaaacaatgtcatgtaactctcttcgctacagatacggacagtttctgtagcctctaaaacaggcaggaaatggccttcataaccattctccaattttgctggaggatcagggtggtggaagtcattttaaaaaccagctgcaatatactgtactaccagagagtggggtgaagcaattgagtccttttacctagctgactccgaatcaagacagctaaaagaatgtaccagaaagaaagaaaaaataaaatgctaccaaaatcccaatccattatctaccctttatggagaaaagtacctttataatgttttacaaagaatcgtggtctcaagtttccactttgttttagtaataaagaactttcaaaaaaaaaaccactctaaacaacaccctcctgtatagaaagctctattttaataattaatgcaatgatacccttgttggaacaatccagccgctttgaaactctggtatttacttactagatgaacaagtttctctatggaggtgcctttaacttctcaagaaatgtgtaagttaagacggctccaaattacattttaagagagccttgtatttttagaggttctttttcatcggtcagaaaaacttacgttgacgattctgcaagaaaggttgctcgcaaaccatgcatcgcaaagctaccgaggcaaatttaaagaaccaatgaaaaagagtggaggctcgtctgaatctttaattggctatgggaatttcaatttattgcataaataatcttttagacctcaagatacacgtgacctagggacagtttacatcaatgggcaagacttaaaaatagacaccaagttcagcaagtatttgagcacctactaaaaattacacaactcccacaacaacgcattttgcgtttctaaagttgtaagcagcatgttcggacgcttgatgcaatttcccaagttgtttgggccccccccccaaaaaagtcttctcagtaaaaggtggggggaaggagggtattttgggggcaacaaaccaaactggtctgtcgcatgttaagtcaatttcacgttcacctactggtcaccacgaagccgaggaaagttttaaaaagaacattccggggtctccagagatcatctctccaagtccgctcggcaccggcgcctgagctggggctaaggtcccgcgtctctggttctgtcctaatagaatccgggacatccacagggattccccggggcagccttcagtgaagaccagggagaggggccgcccgggtctcacgggtgcttcccgcgctggggatggcggcgagcagccacggcctatggacgcgcaagggaaagaatgcagcgaccccggagctcgcagggccgcccgcccaggagtctgaggctgggaggacctcaccttgctgcggtcctcctcctgctgctgcagcaactcgggaaccgcggccatggcgacgcgggactcgagcaggggccgcctggctgtgcgaggaaagaagaagctgggccgccgccgccgccgcctgggcgcctctcgggggcggccacggccccgcctccgccggcctccctgcccgacggcggcaggaggcctccggactccgccaccatcccagctgccccgggagcaggcgagcagggcgccacgtgctcccccagagcagcctcccagtccccgctgccgtccatcttggagccgggcaaagacgccacgtggggcctacccttgctccgctccacgaggaggccgccaaccgcagggccgcgacacggacgggaagcaacggacactctcccagcaagacgcgtctagagaaagaccgcgtttcggtgcggggggaatttattactcagcccgagtccaagatggcagcgagcgctgacgtcaccagatctcgtgagagcagaagggcgcgatttggaggctcccgcgcttcggagacgccggcccttccgctcggagaggtactccctgcctctaactggtggcgcgttggcggaggccgacgaaagcctcgggtggggcgtgagcgccgcggggcattctggacctgctttgccttaggctgtgcctaattcgaaaccaaagcgcgggacggatgaaagtacgggtcgcgagaggttgttcgcgccttgagagttaagcgaagtgtggtggcttccaaggtaccgacacttgccgtaggctgggcttttatttaagtcgtcttttctctaatccagactcctgccacaggggccaccgccgtcctggccccgccaggggtccgcacccacggcggagcgggaggcgactttttgcggtcacagtaatgggacctcagcgccgccaccagctctgaccggcgagcgacgggaccctccaacccgatttccacgtctgtgcaacgggttcattctagacccacggtagagggtgtgaggaccaaatgagaagtatccacacagaatacttagcagagagcctggtgtctaggaattagtcgtcgtctgtcacctaggactgtgtggccgccatgggacgggctccatctttgtgtttttccgtgtctcgcacacgcctcccttcctgggcgtcacattcctgcagattagaaactgggacgtcttgcctcaagctgtctactaattcgcatttagtatgtgtcggtccttcgggtattgagtcttgatttatttataaattttttttggaggcagggtctcgctctgtcgactttcttaagaaagggctctgtccaaacatgtcgaaaaagttcacaattttgatgtgcaatatcattctgatgcagctttcgctttgatggttgttttctctccaataggaatacaaacataaaggccttcgaccgttgcaaatagactaaagtgaaaacaaatctgaatgaagatgaagttatttcagaccatttgcaggcagctcaggagttcaaagttttctgtggaatcagctgcccttgtggctttctctacttcctcttactcatgtggccggaagaaaaaagtgaacccatatgaagaagtggaccaagaaaaatactctaatttagttcagtctgtcttgtcatccagaggcgtcgcccagaccccgggatcggtggaggaagatgctttgctctgtggacccgtgagcaagcataagctgccaaaccaaggtgaggacagacgagtgccacaaaactggtttcctatcttcaatccagagagaagtgataaaccaaatgcaagtgatccttcagttcctttgaaaatccccttgcaaaggaatgtgataccaagtgtgacccgagtccttcagcagaccatgacaaaacaacaggttttcttgttggagaggtggaaacagcggatgattctggaactgggagaagatggctttaaagaatacacttcaagtaattatctcaattctgattctatatgtttgctatgttttctataatagagagcaacggtgtcaaaagaatgaggtttggttttgtttttttaacttactagcaaggaactcccttcagatagtaattaacattaaatagcactttatgtgtattaactcacttgatcctcatggtagtcctgtggagtatagatactgttatccacattttacagatgaaactaaaatagatcaaatatttgactaaataatacataaaattcacttgttttataagctaccaacaatattagaattgcttgttttccttgattattgaaaaaagtcacctggtaacagaattctagttgtttgctagataattctgtttagaatccagtaaatacccactgtcctacttattagcgtaaactgactcgtaaatttaaagaccttgaagcagaccagaacacatgacctatatttagaccttggtaaacataatcagaggttcttcataaggatctgaggataaatacactttaaccttcaacttctaatttactaacttggacaagtgaggagaatagcttccttaaatttaatattccattcaaaaacaaagaccattggcactggtgaattagctagtcccataaattatataggggtcttttgttaaaggaaagtttcacatcaatcattcctttacccaagcttcccaaagtgcagtacatgtactcttagtagtacacaaactctttcatttttgttttaagaatagtgtactgacccttgccatagcctgggcttctatttaagtcgtcttttccctaatccagactcctaaaactatgcgtgtaacacattaaacatgtcacatgttctaaagaaaaatactaagtatatataggtggtattggatatgtaccaaatggtcaaggcctttgctccttataatattcctcagctgtgtggggcaaggattatatatgcaagagctaactgccttcctaagatagttaattagtagcaaccaccaaactattgtctgctttccaagcaagcaacataaaaatcttctaatggcatcttacagttttgtatttgtaccactaaaatttagaattgatagttttctcatgagaagttattttccttaaaccaggaatgtacagctgaaattactaataagaaatgtattattaaaaggcagaaacctgctggaacacatgggaccccagggcctgtagctcttggcacaaagtaaggaagtgcaccagagaggaatttctgtttggaatgtgaatgagccccaatagcccaggcagagagaagactggttgttttttttttcatagagtcagctttgttgatctagattagcactcagctgtgtttctcagttaactcagtagcaaccttaagaaatgagcagaatcgcttaccccagcaccccgcccagacttgaccgccgggacccaagtgattctcccatctcagcctgctgagtagctgggaccacaggcgtgcaccaccatgcctggctaatttttttattttttgtagcgacaagggtctccctatgttgcccaggctagtctccaactcctgtcttcaagtggtgctcccacctcggcctcccagaatactgagactacaggtgtgacccactgtgcccaggcagaatcactctttttagaaaataagtattagtaagcagtgggttctgaaataaataaagggacaattagtgtcatggtgaataaaagaaaaagggctcactaaattgattaacgggtctggaggatactggatcccaaacccaagaaggtggcacccaagaagaattacattttaaaaattaagaagatttttttaatgaaaaatattggatcagtaatttctacccagtcttctcaaaggtgagagcatagaaatgtgtctggcattcttccaaatacttgagcagtttcccaagcatcagttcatcttttgaagactggtgggaatgagaaagtctgacttattctgatttatattttgtgtataaatacacacaaagggatggggtttaggttttaatttttttttttttttttttgctacgctgatttaatcctgaagtattagccatcctgccagttccatcatgagaatactggagatgcatgaaggttttttttagtgcacttcatatacgaggacttgaaaacatttcactttcattactttgagtgaataagcagacttgatgctacatgcagtgaatattcttggatcattttttatttttataaattgaatcatgttgaatgttctgagccttagtgtctaaaggatcctgtaatctaggttttcatgtttgtgatcatgtgtatatgaagaacctagccaggggtaagtttgcagcgagaaatgtatggtctattggcatggcatttgctaagtttttttcttcctgtttttaacatgtttgtcttctgcttcattaacctagtgtgtagatgaatgctatacacttctttttcctaggctttaattccatcagtcataaatttcttgtaggtctttcacgtgttaataattccaattgagtcaagtaaatttggagtagaataacttagttcctaagttgaatttcatttaactctccaaataatttttcagaagggattccattttttgctaatgatagaattgacatttccagctgggcatagtggctcatgcctgtaatcctagcactttgggaggccgaagcaggcggatcacttgaggtcaggagttcaaaaccagcctggccaaaatggcgaaaccccatctctactaaaaatacaaaaaaattagccgggcgcagcgatcacttgtaatcccagctactacggaggctgaggcaggagaatcgcttgaacctgggaggtggagattgcagtgagccgagatcataccactgcactccagcctggaaaaaaaaagaattgacatttccatctttgtaaaaaatagttgaaggccgagtgcagtggctcatgcctgtaatcccagcactctgggagaccaaggtgggacgattgcttgaggccaggtgtttaagaccagcctaggcaacgtagagagattgcatctctacaaaaaaaaaatttttttgaattagccaggcgtggtggcacatgcctgtagaggaagctgagacaggaggattgcttaaggccaggtgttcaaggttacagtgagcaatgatcgagccagtacactccatcctgggtgacaagtaagaccctgtctcaaaaaaaaaaaaacttgacaaatgtaaagttgttttccgccttttctgtgggtctctctgcaagcatgttccaagcacgtgtatttcctgctctgtttctctgagtatctaattggtgatttccaagattgcttcctttgctctactgtgtggtagattggaaacagattctggtgccaggctgcctgtccagctttttgctttggggcaaattaacagcactgcctggtgggatagggcctcattcattaaaatgggggtaacttacaatccctattttgctgggttgttgggtttgaaaattaaataatgttttgaaagctccaaggccattgcttagcataacagtcccccctctttctctcctcttactaagaaacaagtgaatatatttcttgtgtttgttgagtctctttgtgtgtttttttttttttttttttttttgagattgtcttgctctgtcacccaggctggagtgcagtggcatgatcttggctcactgcaacctctgcctcctgggttcaagcaattctcctgcctcagcctccagagtagctggaattacaggcatgcgccaccacacctggctaatttttgtattttgagtagagactgggttttaccatgttggccaggctggtcttgaactcctgacctcaggtaatccgcctgccttggctgcccaaagtgctgggattataggcataagccaccatgcccggccatgttcccttttttaaaatgtgtatgaggagggggcttactatgcaagcgcttggaggccaacgagcactgaaaatgaggagagagttcaaaaatcaagttagatcctgggatacgccaacaaatccagacactacagttctttcggagaaacctggggacgaaaagtaaggctttgacctcagaaaatgaacatacaggaaaaataatgtgtcctaatgtgtcctaatgaaatttctctagtattcacatgttataaaatgttaggaagaaagaagatgtgtcctcctacaagccataaatcagaattctaataatctaaagctaattagaaaaatattacatgttaaatattaaatattagaatagaaaaatgtatgagggaaaaaaattgagacacagctgaatttttcaggctgttccagcactaaaaaaaaaatacaggagaagaatgtcacatattttcctcttcctccccctccagattccataatatcaaattcataacttttcatttgcgcatgccttattttccattccttgtttgtcactaatcctgttagtaaaaggattcccccacctatgttcataattaagttttggtctaaaaagaactacaaacagaagcacagttccctagatttctaatttttttttattttatcacagccagttaacttattacattggatacttaaacacatagtaccataaactggatgtggtcttgtagccgccagatcttcagttttgactttggcccaattctcctagaagtacttaattttaattcattttattacctaacgtcctattaataatcccgttggtttcaaagtatattcttaggtttcacaagaggctgaaatttggtcttaggggttgtcacttaaaaataactaatgtaatttttggccgggcacggtggctcatgcctgtagtctcagcactttgggaggccaaggctggcagatcacgaggtcaggagttcgagaccagcctcaccaatatggtgaaaccccatctctactaaaagtagaaaaattagccaggcacggtggcgggcgcctgtaatcccagctactcaggaggctgaggcaggagaatcacttgaccccaggaggcagaggttgcagtgagccaatatcgcccactacactccagcctgggcgacagagggagactccatccaaaaaaaaaaaaaagaaaaaaaaatgtcatttttaattgtattgtttcagggcgttttagagtatttgtttttcagtgttagctttgtttgtgtttcccccctccccttttccctgattttcttttcagacgtctttttacaagggaaacggttccacgaagccttggaaagcatactttcaccccaggaaaccttaaaagagagagatgaaaatctcctcaagtctggttacattgaaagtgtccagcatattctgaaagatgtcagtggagtgcgagctcttgaaagtgctgttcaacatgaaaccttaaactatataggtctgctggactgtgtggctgagtatcagtaagtatgagattggaggtgaattaatacagcgtaggacagatggtgcctgtcaaaggtgtgcctgtaggtactgtagcctctgtctgtttaatgtccagacctttgtgctaggtaaaagaattgggtggggcggggttgagaacaggtacaaggagaagagccacgtaacctttgtcatccagtactccaaaatcaaattgtttgctggagaaaggtatattctttgtttgtttgttttgttttgagacggagtgtcacccaagctggagtgcagtggtgcaatcttggctcactgcaacctccgtctcccaggttcaagcggttctcctgcctcagcctcctgagtagctgggactacaggcatgcaccaccgcacctggctaatttttgtatttttagtagagacagggtttcaccatgttggccaggctggtctcaaactcccgacctcaagtgatccatccaccttggtttcccaaagtgctgggattacaggcgtgagccactgcacctggccgagatttttcaatctccctaacatggcctgtttgccagcctgtccttcccctcccccaaagcaaggtacctgccataagatccaatttcattcctgcgttttctttcctgtttttctaaagatagcaccatgatctgttggttctgaaaatcaactcttcctggcttccaggcagtgcttgacatggatcagagatctgaacttactaaagcttcccatggttgttttgttttgttttgtttcgttttgttttttgagacggagttttgctcttgttgcccaggctggagtgcagtggtgcgatttcagctcactgcaacctccatctcctaggttcaagctattatcttgcctcagcctcccaagtagctgggattacaggcatgcgccaccatgtgtggctgattttgtatttttagtagagatggggtttctccatgttggtcaggctggtctcgaacttcggacctcaggtgatccgcctgcctcagcctcccaaagtgctaggattgtaggcatgagccaccacgcccggtccccatggtttttatatcgtagctgtcttactgttttactcaggtacttcagagtccaagtgttacaggaaaggggtcctgatccagaccccgagagggttcttcgatctcgggcaagaaagaatttaggttgaaggcaggcacagtggctcacgcctgtaatcccagcactttgggaggccgaggtgggcagatcacctgaggtcaggagttcaagaccagcctagccaacatggcaaaactccgtctctactaaaaatacaaaaattagccaggcgcagtggtgtgtgcctatagtcccagctactcgggagtctgaggcaggagaatcactttaacccgggaggcagaagttgcagtgaaccgagatggtgccactgcactccagcctgagcaacaggtgagactctgtctcaaaaaaaaaaaaataaaagaaagaaaagaaaaagcattcaggatgagtctgcagtgcaaagtaaaagcaggtttattaataaagtaaagtagtggaagtatagctactccatagacagagcagggcgttcctgaaagtaagaggaggaacacttccaccctaagtacagtgctcatatatataagataaaaaaagagatcttggggagatgtgctctactgcaagggtttgtgataaaggattaattttcttaattattatattttgcaagaatcgatactatctttaaagcaaaattaggaatgccttcgttctccagatatcagggtatctggacactcccaagtctgggtctgtttagtaaacattattaatttgttcccttaaccttaaacatctagaggctatgaatgcctgactttctgggaatgcagcccagcaaggcccagcctcactttcctagccctcactcaagatggagttgctctcgttcgaacgcctctgatacaaaggtggctacaacctgcaggtacccctaatccaaataaggcaagcgatcactaagaacaagatagaaaaatccgttcatgtaaaccttgaagctctagttaaaatttaagtttaaaagcttgtctattccacagcccaatacaaattcgtaaactttcttaaaacattatgagatttttttttggttatttatttatttatttttagttcatcagctattgtgtggcccaagacaattcttccaatgtgggccaggaagccgaaagagtgggcacccttgatagtctgaaaactgtttagaccacctaatggttttattttttatttatttatttttgagacggagtttcactcttgttgcccaggttggagtgcaatggcgtgatcttggctcactgtaacctctgcctcctgggttcaagcgattctcctgcctcagcctcccaagtagctgggattagaggtgcacgccaccacacccggctaatttttgtgttattagtagagatggggtttcgccatgttggccaggctggtctcgaactcctgacctcaggtgatccacccacctcagcctcccaaagtgctgagattacagacgtgagccaccgcgcctggcctagaccacctaatggttttatagcacaactgcgtcatatctgagaagagccctgtataccaagagatttaatagactttggttgccttttagataaaccaaggaagccatacagtcacctccacccaaggcctacaagaagttcctgacacccaatgcttgtcatagagatgataaaatatgtccatagcactgttgtttgttttttgctttttaagtcaacatcaaccttggtaatatgaacatttttgaaactacggtttttttttgttgtttttgtttttgtttttgagacagagtcttgctctgtcacccagactggagtgtggtggcccaatctcagttcactgcaacctctgcctcctgggttcaagcaattctcctgtgtcagcctccccaagtggctaggactacaggcacccaccaccacgcctggctaattttttgtgtttttagtagagatggggtttggacatgttgcccaggctggtctcgagctccgggccttgagtgatctgcccgcctcagcctcccaaagtgctgggattgtaagtgtgagccactgcacccagcctagaattttttttttttaagacacagttttgttcagttgcccaagctggagtgcggtggcatgatctcggctcactgcaacgtccacctcgcaggcccaagcgattctcccacctcagcctcctgagtagttgggaccacagatgcgaacaaccacgcccagctaatttttttgtatgttttgtagagatggggttttgccatgttgctcaggctgatctagaattcctgaactcaagcaagctgcctgtctccgtctcccaaagtgctgggatttacaggtgtgaggcaccgcgcccagctaagaattttttatttttgttatttttttaattttatttatttatttttttgagatggagtcttgctctgtcacccaggctggagtgcagtggcgcgatctcggctcactgcacgctccgcctcgggttcacgccattctcctacctcagcctccccagcagctgggactacaggcgcatgccaccacgcccggctaatttttttttttttgtatttttagtagagacagggtttcaccgtgttagccacaatggtctcgatctcctgacctcgtgatctgcccgcctcggcctcccaaagtgctgggattacaggtgtgagccaccgcaccgggcctaataattttttattttattttagtttatttttttgaggcagtctttcactgtcacccatgctggagtgcagtgatgcattcagggctcactgcagtctctaactccccaggctcaggctgtccttccacctcagcttcccaaatagctggaactacagggatgcaccaccacacccaactaatttttctattttttgtagatgtggggtctcaccattttgctcaggctggtcttgaactcctgggctcaagtgatccaccacctcagcctctcaaagtgttggaattacaaacgtgagcccctatgcctggccgattttgtttttgagaaggagttttgctgttgtcgcccaggctggagtacaatggcgagatcttggctcactacaacctctgcttcccgggttcaagtgattctcctgcctcagcctctctagtagctgggattacaggcgcctgctaccatacccagctcatttttgtatttttcatagagacggggtttcaccatgttggccaggctggtctcaagctcctgacctcaggagatctgcctgcctcggcctcccaaagtgctgggattacaggtgtgagccactgtgcccgaccccactgaatttttaatgggtaatatgctattaagagtaactccccacacccactctgtattgaacctctgtttaaaaagctcctgtgttcctgagatattgtatgaccatatgtacaatcatttgtccccacactcattttttaacacaagatgatataccctgcttttttccacttaaaaaaattatttaaaaaaaaatcaggctgggcgcagtggctcacacctgtaatcccagtactttgggaggccaaggcaggcagatcacgaggtcagaagattgagaccatcctggctaacacggtgaaaccccatctctactaaaaatacaaaaagttagccaggcatggtggcaggcgcctgtagtcccagctacttgggaggctgaggcaggagaatggcgtgaacccgggaggcggagctggcagtgagctgagatcacgccactgcactctagcatgggtgacagagtgagactccatctcaaaaaaaaaaaaaaaatcttttattagtttatatagatctgtaacattcttttctcatgtaataattttccaccacccacaattaacacttaacactggtgcatttgcttaaaactttttttttccttatccctgtgattacatggagatcttttttttaaagaaatataatattacagattaaccccaaattctgttgaaccacccgtggccaaaggcgattgctgttttaagtttggcactacctccttctagtctgccttctacgctcttttttgttcttttctttttttaatgaccaatgatctgtgacacagcatcaggagaacctaagaatatgtgccctctatactcttagcacacacataatgctatgtataatacacatgcataggcagcacttatgtatgatttcatgcagaactgtgacagtcataatatacagacatctctagatacacagcatcacaaagctagtaagatattgggctcaggagccagctgcttgagtttggattctggcttggcttttcatcttaaccttagattaattacttagtcgctctctgtctcaatttattcatctttaagataagacaaatggtagtacctaccttgttataaaatgagatattccctgaagagtgcttaatgcatactatgtattcagtagatgttacattattattttgatctacttctttttttacttttttatagaaataattcttgctgtgttgcccagactaatctagaactgggaaggaagtatgatcctcacctcagcctcccaaagtgctgggattacaggcgtgagccaccttgcccaatctactactcgtgtgtgtgtgtgtgtgtgtgtgtgtgtgtgtgtgtgtcagagtctcgctctattgcccaggctggagtgcagtggcacaatctggactcactataacctccgcctcccaggttccagcaattctgcctcgccctcctgagtagctgggattacaggtgcctggctaattttttttgtatttttaatagagacagggttttgccatgttggccaggcttgtttcgaactcctgacctaaggtgatccacccatctcagcctcccaaagtgctgggattacagacttgagccactgcacctggccctacttctctcttaactcgttttttgtattcttttgtatgaatgagccttacccatttccctattgggaacactcagattatttctagttttccacaattacaaacagtgctgcagcaaatgtgcctctttgtatattacagagctgttctaggcagatgcacagattcatttgtttatttattttttttcttgagacggagtttcacccttgttgcccaggctggagtgaaatggtgcggcaccgcaacttccacctcctgggttcaagcgattctcctgtcttgtactcccaagtggctgagattacaggcatgtgccaccatgctcagctaattttttgtttttagtggagacagggtttcaccatgttggccaggttggtctcgaactcctgacctcaggtgatccacccacctcagcctcccaaagtgctgggattacagacatgagccaccatgcctggcctgtttgttttagacgtgtgatatatgcagttacaatccatttagttggtctgaagtagacccggacatgactgcttcttaaatctcccaggcacttgtcacttcacttgtactcaggatatcaagccattgctatcctatactttaggaaggttgctgggtcaagggtatgcattttaaattaccaagaatatgagtgaatacatttaacaatacagtgttagtaattttgataacattgtatttttaatttgcatgtcacataagtgagactgagcatcttttcatttaagagctatttgtgaactgttactgtacttttaatttgggtttacgctactatgatgttaaaaaatgtttttgactgacaataattatatatatttataggctacagtatgatattttgatatatgtatacctaatggaaagattaaataagctaattatcatatccatcacttcacctatttatcattttttggtggtgagaatctttaaaatctactcttttagcaacttttaaatatacaatgcattattaaatatggtcaccatgctgtgcaacagatcactaaaatttattcttctgacctaactgaaacctcttaccctgggatcagcatctcccctttcctcttccccactctccatccctatcctcttgtaatcaccattctactctctctctttctgagttcgacttttttagattccacatataaatgaaatcatgcagtatttgtctttttgtgcccagcttatttcactcagcaaaatgttcaccatgttcacccatgtcacaaatgacagaatttccttctttttaaaggctatgtagtgttctattgtgtgtgtgtgtgtgtgtgtgtgtgtgtgtgtgtatccacattttctttatccatttatccatagatggacacttaggttgtttccgcatcttggcctttgtaaataatgcttcagtgaacctgggattgcaggtgtctcttcaacatactgattttaattcgtttggctatatatccaaaagtaggattcctggatcgtatagtagttctggtttcagtttttagatgttttagttttctgaggaacctccatgatgttttctcaaatggctatactaatttacatgcccaccaacagtttatcagggttctcttttctgcagtcctcaccaacacttaccttttgtctttttgataatagccattctaacaggcatgaggtaataatagcccagtgtgattttgatttgtctttcactaatgattagagatattgagcatattttcatctatctgttggtcattcatgtcttcttttaagaaatattcattgagctcctttgcccattttttaatcaagttatttgttttgttactatttagttgtttgagttccttatatactttggatattatccccttatcagataggtggtttgcaaatattttctcccattctgtggattgtgtcttcactgttgtttcctttgttatgcagaagctttttatttggatgtatatgtctgtttttgcttttgttacctgtgcttttgggcttctgagaaatcatggctcagatcagtgttggggagcttttctcctgttttttttctagtagttttacagtttcaggtcttaaattttaagttgatttttgtatgtggtatgagatagggtacaatttcattcttatgcaagtcgatacccagttttcctaacacaattgacaaaacattccccattgttcgttcttggtacctttattgaaaatcaattgactgtaaattcatggttttgtttctgggctatctgtcctgttccattggtttaaggtgtctgcttttatgctattatcatgctgtttgattataacagctttactttatacagccatgttccacataacaatatctcagtcaacgacagactacatgtaaacagtggtcccataagattataatggagctgaaaaactcctatcatctagtgatgttatgttatagtgcaacatactactcgtgttcgtggttatgctggtataaactaacctcctattcagtcatataaaaacagcacataccattatgtacactacagtatataattgataatggtaataaacaactattactggcataagctggtatataaccagcttataaacaactattactggcatattactggtatttactatgattctgaccctgtgtaggcctaggctaatgtgtatgtttgtgtcttagtttttaacaaaggtttaaggggtaaaaaataattttaataatagaaaaagcatgtagaataaagatatcaaaaaagaggccggggcatggtggctcacacctgtaatcccagcactttgggaaaccgagacaggtggaccacttgaggtcaggagttcgagaccagcctaggcaacacgatgaaactccgtctttgctacaaatgcaaaaaattacccgggtgtggtggcacatgcctgtaatcccagctagtctggaggctgaggtaggaagattgcttgaacccgggaggtgggggttgcagtgaaccaaggttgcaccactgcactccagcctgggtgacagagcaagactttgtctcaaaaaaaaaaaaaaaaaaaaagaaaaggaaaatatttctgtatagttgtacgatgtgtttgttttaagataagtattattacaagagtcaataaattaaagaagtggccgggcatggtggctcatgcctgtaatcccagcactttgggaggccaaggtgggtggatcacctgaggtcaggggtttgaaaccagcctggccaaaatggcaaaaccccatctctgctaaaaatacaaaattagccaagcgtggtggtgcatgcctgtaatcccagctatttgggaggctgaggcaggagaatcgcttgaacctgggaggtggaggttgcagtgagccaaaattgtgccattgcactccagcctgggcaacaagagtgaaacaccatctcaaaataattaaagaagtttatacagtaaaaaagttacagtaagctaaagttaatgtattattgaagaaagaaaaacgttttttataaatttagtgtagcgtaagtgtacagtgtttataaagtctatagtagtatacagtaatgtcccaggccctcacattcactcaccgctcactcactcaatcacccagagcaacttctagtcctgcaagctgcattcgtggtaggtgccctatacaagtatactgttttttatcttttataccacatttttactgtaccttttctgtgtttagatgcactaatgcttaccattgtgttatagttgccagcagtattcagtacagtaacatgctgtacaggtttgtagcctaggagcaaaggtctgggtgtgtagtaggctatcctacctaggtttgtgtaatatactctatgtttgcacaatgacaaaattgcctaaccatgcatttctcaggacatatccctgtcattaagctacacatgactgtactttgaaatcaggcagtgtgatgcctccgacttcattcttttcactcaagattgctttggctattcggagtcttttgtggttccgtgttaattttaggatttttttttttctatttctgtgaaaaatgatgttggaatttttttttctttttgagacagagtttcacccttgtcgcccaggctgcagtgcaatggcacagtctcagctcactgcaacttctgcctcccaggttcaagtaattctcctgcctcagcctcccgagtagctgggattacaggggcacatcaccacgcctggctaatttttgtatttttagtagagacgaggtttcaccatgttggccaggctggtctggagctcctgacctcaggtgatctgcccaccttggcctcccaaagtgctgggattacaggtgtaagccaccgtgcccggcagaattttttttttttcttttttcctgagacagggtctggctttgttacccacgctgttgtgcagtggtgcaatctcggctcactgcaaactccacctcctgggctcagcctcctgagtagctgggacaacaggctccagccacaacacctggctgattttttggtattttttatagagacagggtttcaccatgttgcccaggctggtctcgggctcctgagctcaagcagtccacctgccttggcctcccaaagtgctggagattacaggtgtgagccatcacacctggcctgccattggaattatgataaagattgcgtggaacctatagattgctttggatagtatggacattttaacaatattcttccagtccataaacagaggatatcttaccatttatttgtatcattttcagtttctttcatcaatattttatagttttcagaatgctattaaggtttttttttttacatttattaagttctacaattacagtacattgctgcaaacagtgttctgtggcagaaatataacatggtggctcacacctgtaatcccagcagtttgggaggccaaggcgggtggatcacttgaggttaggagttgaaaccagcctggccaatagggcgaaaccccatctctactaaaaatacaaaaattagctgggcgaggtggcgcacacatgtaatgccagctactcagggggctgaggcagaagaatagcttgaacccaggaggcggaggttgtggtaagccgagattacaccactgcactccagcctgagtgagactccatctaaaaaaaaaaaaaaaaaaagaagaaccaggaatggcatcctagagttactggggcccttttctcaactacacagattgtcaaacttggcaatattacaaaacaattctgaagacaataaaattatctctaaacctaaactgtccagtagagtagccactaacccctatagctattgagcatttgaatgtggtcaggccaaactaaggtgtgctatagcaatatacaaactacatttcaatgactttgtacaaaaaagaatgtaaaatatccctataataaaaaaaagacgtaaaatatcccattaatcatttgttagttgattacatgttgaaatgatattttggatatgttgggttaagtaaaatgttaaaatttcagctgtattttttttttcttttccgatgtggctactagaaaatttaaaatgacacatggctcacattttacttcttttagccagtgctgctctagactgagtttgcatgaggtgtaactgtctagagctatagtgacatgtaagtaatatacatgctttgtacaaaatctccctataaactgctgattttgaaattgaagtcatgaaagacagattgaaccgatagagtcctttgagagtcaccagttactggtccactctctgtatccttttgatatttgcatttggcaagtataaacccgaccaggataggggatggggggaggaatccactggttatttgatgcaaaaaaagagggagaaaaagtgggggggtgcacttatagtcccagctacttgggaggctgaggtgggaggatcacttgagcccaggagtatgcgtttagcctgggcaacatatgaaaccccatctcttttttaaaaaaggaaaaaaatggtgaataagagcaatggtcattggctgacaagtaacaaactatacataagagaactgttaacctagtagagattttcattgtgatctattacctacaaagtcttcctgtggtttctctttaggggcaagctctgtgtgattgattggaagacatcagagaaaccaaagccttttattcaaagtacatttgacaacccactgcaagttgtggcatacatgggtgccatgaaccatgataccaactacagctttcaggtcaggacactgagcctttacttaaagctttgctcaatgcttacttaaaactataactccgggccgggcgcagtggctcatgcctgtaatcctagcactttgggaggccaaggccggtggatcacttgaggtcaggagttcaagaccagcctggccaatatggtgaaaccctgtctttaccaaaaatacaaaaactagctgggcatggtggctcatgcctgtaatcccagctattctagtagctgaggcaggagaattgcttgaacccgcgaggtggaggttgtagtgagccaagattgcgccactacactccagcctgggcaagagagtgagactccatctcgaatctgtctcaaaaaaaaaaaaaaaaacttctcagtgggggggtaggaggagaaaaattgtaaaaaaaaaaaaagttaaaaaatagaactccttgaggtttttccttttttaatctctatttttatcccattgcttaacgtcttccttgttcctttcccacttaaaaaagcactttttggctgggcacagtggctcacgcactttgggaggccgaggcaggcagattgcttgtgctcaggagtttgagtccagcctgggcaacatagtgaaaccccgtatctacaaaaaaaatacaaaaattagctggacatggtggcgcacacttgtgccagctacttgggaggctgaggtgggaggattgcttgagcccaggaagtggaggttccagtgagccgagattgtaccactgcactctagcctggccgacagagcaaaaccctgtctcaaaaataaataaataggccaggtgtggtggcccaagcctataattccagcactttgggaggccgagttgggcagatcacctgatgtcaggagttcaagaccagcttggctgacatggcgaaaccctgtctctactaaaaatacaaaaattagctgggcgtggtggtgtgtgcctctagtcccacctacttgggaggctgaggcaggagaatcgcttgaacccaggaggcggaggttgcggtgagccaaggttgttccactgcactccagcctgggcaacagagcaagactgtctctctccaaataaataaataaataaataaataaataaatagcactttttggccaggggtggtggctcatgcctgtaatcccagcactttgaaggaggccgaggtgggcagattgcttgagcccaggagttcaagaccagcctgggcaacgtgacaaaactccatcattactaaaaatagaaaaatcagccggaagtggtgcccgcctcagcttcgagggtgcaacgagccgagattgtgccactgcactccagcctggacgatgggagtgggatcctgtctcaaaaaagaaaaaaaaagcacttttccaccctcttcttgggccttttttttttttcaatggctctgtaaggatcacagcccagtcttcaatgttttatctgtcatctttgtgttcttgtgtcctggtgcagtctttgatcaacctaccttagaaactgagttaggagatatcctgtagattattttatactgagtttgccctggagtaagaaggaaacgaacctaaactctggacctactgtagtgaaacgagaattgccctgtgtttcttcctaggttcaatgtggcttaattgtggtggcctacaaagatggatcacctgcccacccacatttcatggatgcagagctctgttcccagtactggaccaagtggcttcttcgactagaagaatatacggaaaagaaaaagaaccagaatattcagaaaccagaatattcagaatagggagcaagttgctatttgggaacattcagcaccttctcacagtttgggaacatatattgctgtttactccagtgtaaaaatgaggtgccactggatctgagtgctacacgaacacaagtagaagtattaatttgttgaaatgtgttgttaccaaaaagactgaaaagccccaaagtctagatataaagacctagacttcggcacgcgaaatcccagctatgctacctcttatttacctgaaaggaggacacgcaggatgggcagtcatgctggtgactcttgtactcccttgagggacattgggggggggggggcgtggtcccaggcaggatgcccagtctttgagctgagattggaaggcagtgaggctgagggtgccaagatttccccagggttcacccagaggggaaggggctacatgcccccagctgtgtgcagggaggacacatcagcccactaccgctgccaacaccaatgcctaaaacttgtttcatacattggggttttctatatatttcagctgggaaaagcttacatttaaccttttgaaaaaataaatacgtgattagcctcaactaaacattgctgactataaagacagtatattcaccatgtcgctggcaatatgtcattgcgtaacaccaaataaccccccagaagtagccagaggccagtttgaacatcacaattctaagtgttttagtaactatttctggcgtgagtcaacagatcatgtagatagagtcaattattgtttgtggagtttttcagctataggggaggggaactattaaaatccatttgtttctattcaataggtaataaaaattagttgtccctgggtttgggaaacttaaatgcccattacagccctggggaagggttttctgtcttatggagtgagtcttagcatttaagttatacagttgctgccttaaaatagtagcctgctacaatgacttctttgggtagccattttcataagaaataaaatacaagatatgagtaatgaagctttggttttgtttactttgtgtgtttataggataattttataaacctggaaattgtttgcactttttttataattcagaattttacaagcccaatagctttggtgagagttctgtgtaagtgcataaaagaaagcgtcctcggctgggcgcagtggctcacgcctgaaatcccagcactttgggaggccgaggcgggcggatcacaaggtcaggagatcgagaccatcctgggtaacacggtgaaaccccgtctctactaaaaatacaaaaaattagctgggcgtcgtggcgggcgcctgtagtcccaggtgctccggaggctgaggcaggagaatggcgtatacccggaaggcggagcttgcagtgagccgagatcacgccactgcactccagcctgggcgacagagcgagactccgtttaaaaaaaaaaaaaaaaaaaagcctcctcactaagccctcagccacggtcacctagcaaggaaagcaatattcaggtaggagatgggaggatcaagggggacctttgtattatctctatacacttctgcattcatgtgggtttttctcaagctgcagatacatatttctgtagcctgtaaattccagtcaaaaatgaagtgaggcaattaaaagttgtgctagcagagtttgccactctgctctaataagcctcaacctagaatttaggaggctagacctaacaaaatttctttttatttttctttttttttttttttgagaccatctggctctgtcagccaggctggagtgcggtgggctcactgcagcctccgccttccgggctcaagcaattctcctgcctcagcttcccaagtagctgggattacaggcgtgcaccaccatgccctgctaatttttgtatttttagtagagacagggcttcgtcatgttgaccagggtagtctcaaactcctgacctcaggtgatccgcctgcctcagcctcccgaagtgctgggattacaggcgtgagtcactatgtccagctgcaaaatttcattttaatacaggtgttctgttatgtaaatagaaatttgtctcagacctgtgactttgtactaggagtctcccaagataatggtggcctgaaaagttctatgagggagcccctcaggagagtgtgaccaggaggatgtggttggtataagaacagagaaggtaaatccctgggcaggttttcttgacctcaagggctcaccagtttctcctgataatcatgatactcctcgggggtcacatctcctgagatgttaatgtcaacggaaaaagttattgttactacgaaagcataggaggagaaagtcaaatttgagtttctaaatgagttgcagtttttcaagaattaacatgtatgaggcagtggcttacgcctgtaatctcagcactttgggaggccgaggcgggtgaatcacttgaggtcaggagttcaggaccagcctggccaacatggtgaaaccctgcttctctactaaaaattaaactagctgggcctggtggtgcacacctgtagtcccatctgcttggggaactaagacgggagaattgtttgaacccaggaggcagaggtcgcagtgagctaaggccacgccactgcactccagcctgggcagcagagcgagtctccgtctcaaaaaaaaaaaaaaaaaaaaaggaattaacacgtatgttaggaattgttggttgccatctctttgccgaagtgaaatactgcatatgaaactccagtgaaatgaaacagcattcaaaataaggagagacgctcaaggataatttacatttttttaaaggaggtgtgtgtatattgcttttctgaggaggctttctcagaagtacagaatgttgccttccagtgtttagttttgagaaaatccgttggcttcaaagctaactgcatttccttttcctccacagttctacccattcttaccaatgcagtcagcaactgacagaagttccatgctgacacaaaagccaattttgttttttccaaaaaaaaaaaaaaaaaagtataaatatatacacatacatgtatggcctttttcctccttacacctggcctcttcctcagagcctgataatctgagaacattagcctctataaccctattataattctaggaaaactcgtcagtgtatgacctacggtttcatatgtgttgaccttggtaaatacaggaagggggttagtcataagtcagtgtgttcctaggtaaccaatttggctactggctttaaaaggaattggagaagggtactttgttttaatcactgaggctttccacccgagcaattaaatatttgattataacctaccctgtgttcctgcccacccctcaacaaaagagtgaaggaagggaatcattggagtaaaaaacattaagaaacaaaatagagaatagttgaaacttccatgtttaaagaaacaataagttgtttggagctatgtgttaaatcactcaatgctaagtaaaaagtagaactgacttttccttcctgcctcccttcccgccagcagaggcctaaaagttaagcagatatgtgcttctgctggaagtctaacctactgatccacttcagttatttatactattgaagggaactagagagaatctctggggagagaccccagaatgagcaaaaggcttgtatgttgccatgacaataacaattgtcaggttgagtaatgcatttgtgaagatccaatcataaaaagatggccaggcacagtggctcatgactgtaatctcagcactttgggacgctgaggcaggcggatcatttgagctcaggagtttgagaccagcctgggcaacatggcaaaaccccatctctaccaaaaatacaaaaaagtagccaggtgtggtggcatgcacctgtggtcctagctacttgggaggctgagggaggatcgcttgagcctgggaggtggtggttgtagtgagccaagattgcaccactgcactccagcctcagcaacagaatgagaccctgtctcaaataaataaataaataatgttttgggttcagatttgagggttttttcccattttacttaagaaatagatataaaatatgtagattgttacaggccaggtgcaggggttcacaccttgaacccaatgctttgggaggccaaggctagaagatcgcttgaggccaggagctggagaccagcttaggcaacatagaaagactcccatctctaaaaagtaaaaagtcgtgtaatcccagcactttgggaggtcgaggcaggcggatcacgaggtcaggagatcgagaccttcctggctagcacagtgaaaccctgtctctactaaaaatacaaaaaattagccaggcgtggtggtgggtgcctatagtcccagctactcgggaggctgaggcaggagaatggcatgaacccgggaggcggagcttgcagtgagccaagatcacgccactgcactccagtctgggcgacagagcgagactttgtcttgggaaaaaaaaaaaaaagtcgttgggcatgggggtcatgctgatagtcctagctacttgggaggctgagacaagaggatcacttgagtccaggtgtccaaggctgcagagagctatgatcacaccactacactccagcctgggtgagaccttgtctctaaaacaaacaacaacaacaacaaaaaatagaccaggccagcgcggtgtctcatgcctgtaatcccagcactttgggagactgagacgggtggatcttctgaggtcaggagatcgagaccagcctggccaacatggtgaaaccccgtctctactaaaaatataaaaattagtcgggcgtggtggtgggcacctgtaattccagccatttgggaggctgaggcacgagaattgcttgaacccaggagacagaggttgcagtgagccaagaccatgccactccactccagcctgggcaacagagcgagcaagactcagtcttctaaaaaaaaaaaaaaaaaaaaaagcattacagataaaagctgttgccttgttttcttaatcccatttccctctcccctgagacaaatgccgtcataaatttgatgtgggtttttttgtatagttttactgtgtgtactggtttccatgtataatatagttttgctttctgtgtttttagatttacttgctttatctcaactttgtttttgagatgtctccaggttcaccaattctagatctttcataactgcttttaactcctctgcagttctccctcctgttttattgtcatgctaatggactgttcggttaacagtgttttgctactccagacgatgcagcagtgaacacctttgcacgtgttttctggtacacacaatacacatgcaatatagtggaaagtgcagtatggattgtgactctgccacttactagctctgtgaccttggactagttacttgacctttttttttttttttttttgagagggagtctcactctgtcgcccaggctggagtgcagtggcacgatctcggctcactgcaagctcggcctccagcgttcacgccattctcgtgcctcagcctcctgagtagctgggactataggcacccgccaccacgcccggctaattttttttgtatttttagtagagacggggtttcaccttgttagccaggatggtctcgatctcctgacctcgtgatccacccacctcggcctcccaaagtgctgggattacaggcgtgggccaccgcacccggcctgttacttgacctttttgtgcttgatttcctcatctgtaatttgggggaaaataatagtatctgcttcttgaaattgtgaggattgaatgagcgaagcattcagaaaagtgcctgacacatggtgggaacaaaatgttagccatcctcctatcaaatgatcagacctggatgtgtctctgctgggtcaaagcttgaacattaccaccaaattcctctccaaaacagtgacatcgacttaatgtcccaccagtggtgtctgaaatttcctgatttctcgcatattctctaacacaagagttgtgagcccctcttctgacggtatgaaaaccattttttttttggaacagcattaacgcgtgaataaaatctgctttaaaacgcgactgtcatctagtggtgagagaagtacactgcaattatggggcagaagccaaaaatgggcggacctacatctatctccgggtaatttgggcattttagtcaccaacacaggtctgttttgaataaaatcaactacatgagtgttcttcctttacctctgtattttcaggcagcttgtacttctcactttttctactacaataatatagaagcctggctacacagcccagtgaggccccttgctaccaaatgcatctgggtcaccggttcggaaaagtggagtgagataaagtagaaatgaggctatttaccaaactggtaggaaactgcagctccaaccagggcgggcttcccacaggcagcactgattttccagcaggagagatggcaattcccacgttggtgcaggtcatacaggcactgcaggggactcagctcagtcggctcaccagagccccagttaatgcgtcccaatcagcctcagccattctctgcgaggacttctaaaaggattgaaaagtgtatgaaagtgttagatattaatcatcagagacatagatatagttttaaagatctgttagataacaaatattatctaacaggttaggtaacatgctacaattttgtgatgaacaaaaatgttcattaaaggtaatagtgtaaaaaagcaatgttgctgaaatgtaacctaatgtgtctttaagtaatagtatcactaaactaatggcatattaaaagttttttaaaaaaagaagccgtgtgcggtggcttgtgcatgtaatcccgacattttcggaggctgaggctggcagattgcttgagcccaggagttcaagaccagcttgggcaacatggcaaaatcctgtctctacaaaaaatacaaaaattagccaggcatggtggtgcacacctgtagtcaggcccagctactcaggaggctgaggtgggaagaccacttgtgcctgggaggcagaggctacagtgagccaagatcacaccacttcactccagcctgggggacagagggagaccctgtctcaaaaaaaaaaaaaagttaaaaaagaaaacaaattctaaagaacagcaagctaaggtcaactgtgattagaagcattcatttaggcaagtctagactgtcctactgcaccagtctcactcatttctaagctgttgtttgtgctgacacctttgcataaaataacttcccttcctccctttgttcagccatatcttgcctgagagcttgggcctgaaccgcaatcccactgatgatctgctcaagtcttacctgctccacaggaaacaaaatggtatagggcaggaagcaggagcctcagaattgggcagaggtgggttcaaatcctgctgtgcaatgctaagtcacttcagctctccatgcctttttcctcactagtaatttggggaagagtattaacctcagtgttcctggaaagattaacataggaaatgtgtgacaaatgctgaacgtggaataggcactgggcaaagatcaactacttcctccgtggaaccgactctacccttcactgaactcttgtggtgcctttgtttttaccacccactttgattcttgttcatattctacctttttctgttacttcactatttcagatgtacatgtaacaaacacagtgaaaccccgtctctactaaaaatacaaaaaattagccgggagtggtggcacatcctgtagtcccagctactcaggaggctgaggcaggagaatcgcttgaaccctggagggggaggttgcagggagcagagattgcaccactgcattccagccagggcggcagaacgagactccgtctcaaaacaaaaacaaacaaacaaacaaaaagacaaaaaaaactacttattttatatctatttcttaagtaaaatgaaaaacaaaaagaaaaaaactctcaaatctgaacccaaaacatctttttatttatttatttttttgagacagggtctcattctgtcgccaaggctggagtgcagtggcacaatcttggctcactacaacctctgcctcctggattcaagcgattctcttgcctcagcctcccgagtagctgggattacaggtcattaccaccgcacctggctaattttttgtatttttagtagagacggggttttttcatgttggctggctggtctcgaactcctgacctcaggtgatccatccaccttggcctcccaaagtgctgcgattataggcgtgagccaccatgtctggcccagaatagtgttttaagagagagatgagtaaagagacaaacaacagaggaaactgccatttcctagagcagcagaaaaagagctgggtatcagaatggctcaccagagaaatttggttagtgctggtcacccctttgataagaggctgtgggttgacttgtgagctcagtgatttgaaagttttgagtatatgaagaaaaaaaaaagaaatgaaagctttgtgtagaactaggggagtctcgcagtgaaacaagacttgcaaaataggattaatgaggcagtacagataaggatgcgatgctgaagaaagtcatgggattgtagttagacggtgtataaatcagagagctaaaaccaatagggcttgtagatataggtatatgacaggggatttattaggggaatgggctcacacaattatgggggctgagaagtcctacggtctgctgtctgcaggctggaaaaccagggaagctggtagcatggctccgtccaagttcaaaagcctcagaaccagagaacctgatagcactcagtctcaggccgaaagcctgagaatccaggaggccactggtgtcccagagtccaaaagctggagaagctggagttctgatgtccaagggcaggagaagaagggtgttccagctccagaaaacagagcaaatcctcctttcctttgcctttttgttatcctggccctcagctgatggacggtgccccctgacattgagtgaggatggatcttccttactcagtccactgattcaaatgccagtttcttccagaaacacctcacagacacctcaaaataatgcttcgccagctgtctgggtgtcattaatccagttacgctgacacctaagattgaccatcataggtggtaattcattcctttacccgacaaatgtcttattgaatattcatgtctgccttgtgctagttttttgcaaaatgcatggagctgacagtctagagaaagggcaaacaattaataagtgagaaagttagtatgaaaattacagattgacagtgccatgaagaaacagaggatcactgagccaggaggagaattgcaactttggattgtgtggtcagagagggctcctctgaggggcgacacataacatgatacttgaaggaggaaaggaggaaacgtggccagcactgcagagagccacaggaagaatattccagcagaaggatcagcatgttcaaaggccccagggtaggaaagaacagcatgttacaggagctataagaacacaggggtggccagaaggcagtggggaaaggaaaggaattgcaggctgcagaagtgggcgggggagccagatgatgtcaaactcaatatgccatggtaaggagtttagattttactctaagatggaaagacagggataagcaggggaataaagccattccattgccttttaagaagagcggggccaagtgcagtggctctcaccggtaatcccagcactttgggaggccaaggcaggagatcacttgagcccaggagttcgaaaccagcctgggcaacatagtgagacctccacctctatttttttttattttatcttatctattttattttatttattttgagatggagttttgctcttgtcgcctaggctggaatgcaatggcgccacttcgactcaccgcaacatctgcctcccaggttcgagtgattctcctgcctcagcctcccgagtagctgggattacaggtgcatgccaacgccaccatgcctggctaatttttgtatttttagtagagatggggtttcaccaggctggtctcgaactcctgacctcaaacgatccacctgcctcggcctcccaaagtgctgggattacaggcatgagccaccgtacctggcctaatttaattaaaattatttaaaagacgaagaagaagaaaaagaagaagaagaggaggaggaggaggcggcggcggcagcagcagcagcagaagcagatcagcattgtttggagagcagaatgcaggaggcaagtgctgaagcacagcctggctggactattatagacagagctattataataggagtcagcacactggctcatccaccaaatccggcttgctgcctgatacagtctttatacggtctgtgagcatagagttgtttttacatttttaaatgtttggaaaaaaaatcaaaagtagagtctttttatggcatatataatttttataaaattgtaaagattcgaattccagtgtctgtaagtcaaggtttcctggaacacagcatcacccatttgcttttgactctggctgctttccttctgtagctgcaggttaagtcggtaacagaggctgtatggcctgcaaagcctcaagtatttactatctggacttctatagagtaagtctgccgactctcagtctagatgatagaagaggtaggctggcctagagaaatggcagaggaggtgctgggaaggaagattcgagatgtattttgggagccttgcctgagggtttgaatgagatgagtgatgaagaagtataaatggaaggtaagttgtaggtttagggcatgtgtgttatttgctgacatgggaaaggctggagggagaaaatccaggtccagccccatcttttctcctcactaacactatcagttagctttgctgtgcaataaatcacccagcctgggcaacatggtgagactcgcttctagaaaaaacggaaaaaaacaaaataaaacaaactagctggttgtggtggcacatgcctgtggtcccagctacttgggaggctgagttgggaggatcgcttgagcctgggagatagaggttgcagtgagtcatgtttgtgccacagcactccagtctgggtgacagagtgagaccttgtctcaaaaacaagtaaataaaaatcacccccaaattcagtggtttacgacttatttctcatgattctgaggtcaagctgagcatttctggtctgtgctggctcaagtagggctagatgatttaggatgtcatcacttagatgtctgagggttggcctggtgtcagctggggccatggagatgcctgggcctggtgactctcatcctccagagggctaacctgggctctcattcacgcagcagtagcagaaggattccggacagcagcagaacaagccccagcacacagcatttcacaagcctcggcttgggccgtgctgactaatgtctcgtttgccaaagcaggtcatgtggccaaggcaagaccaaaggatagagaaataaattccacctcttgcagagaggagccaaaaactcacatggcaaagggctgtggaacaggaaagggaacaatgggcccatttttacaacccaccatgctaacagcatgacccaggcaagttatctaaagcttttgagcctcagtgtcctcgtctgtaaatgggtaaaataataactacttcatagggtattcataaagactagaaatagctggcacataacatagtagtagctgttttattgttatcatcataatgaaaaagttcagtccctgctgggcaaactcatatttcccaaactccagtcactcctgtgccacaaaaaaactttgtttttgccatatctgagcaccacttaagactattaaacaggttcacttttttttttttttttttttttttagacagagtctcgctctgttgccaggctggagtgcagtggcacaatctcggctcactgcaacctctgcctcccggtttcaagtgattctcctgcctcagcctcctaagtagctgggactacaggcgcacaccaccatgtcctgctaatttttttgtatttctaatagagatggggttttaccatgttagccaggatggtctcgatctcatgacctcatgatctgcctgcctcagcctcccaaagtgctgagattacaggagtgagccaccgtgcccagccccactctttttatttaaagaaattaatttcaggctgggtgtggtggctcacgcctgtaatcctagcacttcgggaggccgaggcaggcagatcacctgaggtcgggagttcgagaccagcctgaccaacatggacaaacctcatctctactaaaaatacaaaattagccaggagtggtggcacatgcctgtaatcccagctactcggggggctgaggcagaagaattgcttgaacctgggaggtggaggttgctatgggctgagatagcaccattgaactccagcctgggcaacaagagtgaaactctgtctcaaaaaaaaaaaaaaaaaaaaaaaagaaattaatttcaaaaggaagcatgaagcatgttaactactacaatgggaagtgactatcacctgtcctaaatagaaggcaataaatacatttatttattgtaaaataaatacagtaaacacaaagcagtggccgagcatgatggctcacacctgtaatcccagcacgctgggagcccaaggcaagggaatcacttgagctcaaggcaagggactcacttgagctcaggaggttgagaccagcctgggcaacatggggaaaccctgtctctccaaaaaaaaaaaaaacggctgggcacggtggctcatgcctgtaatcctagcactttgggagctgaggcaggtggatgacctgaggttaagagttcgagaccagcgtggccaacatggtgaaacccccgtctctactaaaaatacaaaaatcagccaggtgtggtggcacacacctgtaatcccagctactcaggaggctgaggcaggagaatcgtttgaacccaggaggtggaagttgcagtgagccgagatcacgccactgcactccagcttgggcaatggagtgagactccatctcaaaaacaaacaaacaaacaaacaaacaaacaaagctggatgtggtgactcacacctgtaatcccagcactttgggaggccgaggtgggtggatcacttgaggtcaggagttcgagaccagcctggccaacatagtctctactaaaaatacaaaaattagtcgggcatggtggcacatacctgtaatcccagctactcgggaggctgaggcacaagaattgcttaaacccaggaggtggaggttgcagtgagctgagatcgcaccactgcattccagcctgggcaacagagtgagactctgtttcaaaaacaaccacaaaccagggctagtaattctaactcacttctgctttccaaaagcagaatctgagggctgctctctcttttataaaaggaagatattcgaacaaaaggccagtgacaaaggctgtgttatctacagagattttcttccaaacagaatcagaaatatagaaaatggatacacttttttgcggtgtactccaatgttatttagagcagcacagcacagtacataaaattgtctcaagtcgtttaggaaatgctgaggctagaccagaaacaagagggagaaaatcgcccgtttaacaactttccccttcatgaagctcgagacacatataggacatggggcaaagacctggtgtggctcagggactttccacctcctagctgtgtaaccttgaactcacctgtcgacatttggaggcctggggattctcaagaaaaatgcagttaatgacagcttgcctgcctcacagggtcccttaagaaccaattgtgagcctacatgtcacaagccctcatagtctgtaaaatgctgaataaatagagcagattgtaaggctattccctgaggctaggcatgaggaggtgagctgtgaggaagggagaaccagctcattaaccaggggaacaaatgacagtgtgatggcatccctcccacatccatgggggcctctaaaatcaaggagccagccagtggtagggcctagagatgagaggactggtggcctctccaactgctttccagttccaggacctccagcttgtcaccaggacaaccaggcagccctcactccctgcacggcagctcaggtgtcaccccaggacatggaattgatcgagaggcctctgccccttcctttggtaggtttctttgctgaatgctcaagaagcagctccctggttaggaattccaagaacttctaactgacagggagtcccagctgtcccatcatggaaggcagccaccatatgtgtggagagactgtgaactgtgaactacacttacgtaaccctgaactcgagtcttgctcacaagacccagctcatgttccctgcgctgcgaagcttcccaggaatggtccgtggttgttctgtctactgttgcatttgacacagggctctgccaaggtattcaccacatctgcttgtatatccatctccccactagactctgggcaagcctccaactttcaaattattattatttttttgagacagtgacttgctctgttgcccaggctggagtgcaacactggtgccaacatggctcactgcagcctcgaactcctggactctagtgatcctcccacctcagcctcttatgtagctgggactgtaggcatgtgctactatgcctggctgattttaacagtttttgtagagacaggggtcttgcaattttgcctaggctggtctcgaacttttgacctcaagtgatccacccaactcagccttccaaagtgctgagattacatgcatgagccaccgtgcccggcctaaacctcccattttatgtttcctctgcccctggtctaactcagtgcctggtatgtggcagacacacaggtcagtgttacaaatgaccataccctcacactcgctgttccaaatgatggcttcttactaagaacctgagaatttctgcctgcgggttttgtctgggtgcggatcaggccaaagttccatggagttaacaccctggggcaacacttaagcaatgaaaaccagcagttagtggatgaatagcccagcacgggacaaccctggggcaggttctgcacagtcacctggccagacccagcagcactgagccctggctgtccacagcagtgactgctcataaccactctgccttctctttcagtctcacttcccctctaccatctcacgctttctgggtcaaagaaactactatcttggggtctgcttctgctggagctcaaaccaagacaactggctagttggctgattggctgtgtgaatgggcacgattagcagcaaagaaagaaatggaagcccgcgcgccggctgggccctggcacatgcgctgcccccacagtgtgtctagactacgtcggggcacgtgcacagccaacagatccgacacaggaaaaagcacttctcagctgtccccaccatcctgctatttgtcattccatccatctgctgtccccacgaaacgctcacccacgtcagctaaaatggtacactgggcttggaatcggctggggaaatgtcaggctgacagaacaggggggacaactgaaatagcaactgtgtggacggtggtggtgacacaaatctgcccctttgcgtagaaggcaggactcccagagctcaggaggcctcttgcggaggaattggtatgtggcgaaggctgcagggagggggccctgggactcaggggcagctagagcagggccctctgccctgagagctcttcaccccttcctcccagaatagaggagattgtccaaacatagaactcagtttgtttaaagtcattgtttatttttaaatgttcagttcgttttccaatcaatcttccacggtgcagttcaagaaaaatgtgtggattttcatgcctgaggtcagttgcaggatgtacctcgcagaacagcgtgtgcccctgcaagctggggattgagtgttttgttctgttttgttttctcagggtaaaggggtcattctaaaagcaggactgtttggatcttagaagattggatatttatttattatttaaatttttttcttttctttttttttttttttttgagatgaagtctcgctctgtcacccaggctggagtgcaatgggatgatctcagctcactgcaacctccgcctccccagttcaagcgattctcccgtctcagcctccccaaccagccgggattacaggcgtgcaccaccatgcctggctaatttttttgtatatttagtatagatggggtttcattttgttggccaggctggtctcgaacgtttgacctcaagtgatccactcacctcggcctcccaaagtgctaggattacaggcatgacccaccgtgccgggcctattttttttttaatttattttagagagaaggtctccctatgttgcccaggccgttctcatactcctgggctcaaatgatctgcccacgttggcctccaaaagtgctaagattacaggtgtgagccaccgcgcctggccatggatacttatacattctttctacaaatatttattgagtgcctgtgttgatctaggcactgtcttgagctccaggaagaaagcagtgagcaaattcaacaaaattccccacctcttcgagattacagacctgtgggagggctggacagtaaacaaatatatgtacaaatgtcaggagattttaagtgtgaagaaaagcacaggggccaggtgtagtggctcacacctgtaatcatagcactttgggaggccaaggcgggtggatcacctgaggtcaggagttcaagaccagcctggccaacatggcaaaaccctgtctctaccaaaaaatataaaaattagctgggcatggtggcggacgcctgtagtcccaactacttgggagagtgaggcaggagaatggtttgaacctgggaggcggaggttgcagtgagccaagattgcaccatcgcactccagcctgggcgacagagccagactctgtcaaaaaaaaaaaaaaaaaaaaaaaagggaagaagaaaagcaaaggaaagaaaatgcaatttgagtatttgagtttgggtggccagggaaggtgttccagtcatctcactgcatgctaagccacctcaagactaagtgacttgaaacaacaatcatttgcttatctctcatgattctgtggactaactgggctcagctcggcagtacttttgttctatgcagattttctctgcagctacagtccactggcgcttggccaggctggaacggccgggatgcctcacttacatgtttggtgtcctggcagggatggctggggggatgggctcagtgggggtgtttggtcaactgggctccccttccaggtagtctcagcacctttccctctccacaaggcctgtctatgtggcctctcacgtggtctctccatttggcctttccagcaaagcagccagacttctttacatgacagcttggggctcctgcaattcagaagcagaagctgccaggctgtgtcaaggcttaggcctggaattggcagggcatcacgcctgccacgtcctgtttagttgaagccaggaccggctgagatcccatgtgggaggaggccacacaagggaaggggtgctgggaggcctggctccttgcgggctggccacccatgcctccctgaccgtgcgctggctaagcagagaccaggacagaggaaggagtgggccctgcagcgctgaggggacacgcaaagtccccgagtcagggctgtgctgcaggagcagcaaggaaagaaacaggccactgtggcgggagctgaacagcagagaggaaagataaacgacgaggtcaggaggcagccagggaccagactgtcccggccacaggccacagagagggattcaggagttattcctagtgggatgagaagcaccggacctgccttgatccataactggtgggttctgaagctggggacatctccgccccatccccactgctgggttcgcatgctgcccagaacggccctgtttcaactgcagcccctgctcccagcaccctccggctgcctctctgcctgatggtctctctgtggcactcagcaccactgcatgcctgatattttactgatgtccctattgtcttgtttaccttctcactctagaatgtaaacctgaaacagacagggatgtctgtctgtttcatccgtaggcccacaaccattaaatagtatttgttgtaccaatgaactaaccagcccatctctgtaaccccagttggtgctaacactatattgggcctctagcaaaaactgcatgactgaattaatgcaacaacaacaacaacaaatacatatatatatatatatattttttttttttttttaagagacggagtctctctttgtcgcccaggctggagtgcagtggcgtgatcttggctcaccgcaagctccacctcctggattcacgccattctgctgcctcagcctcccgagtagctgggactacaggtgcctgctaccacacctggctaatttttgtatttttagtagagacagggtttcaccatgttagccaggatggtctcgatctcctgacctcgtggtctgcccccctcagcctcccaaagtgctgagattacaggtgtgagccaccgtgcccagccaaaaaaataatttttatagttccagtcaacttatctaaaagttgctttcaaataagcaattatccagggaaaatgaagaagaaaaaaaaagccttcaaagtagcccatgccatgaccgacagtcacaggacagcctctcattcacctatgatcctggtgtacttggtaagtcagttaccaagcagtcatagcctggcgagccctggattaaaggaggagaggcctggaacaagaaggaaaatgccagctgtcagtgaggggaggacagaaaactcaaaacacaaatgtggtcgggtcagcagggcgatgtttcagagcaaagcaatctagggctgcatggcagggacaagctggcccgtgggcctcagcagctctccaagctgtgccagcaaaccacctgacaacaggcgatatctgtaacaatccttacaacacttttcttttttttttttttttcaagaaacagggtctcatatgctgcccaggctagactcgaactccagggctcaagtgatcctacagcctcagcctcccaagtagctgggattacaggttagtgacaggtgcctggctaatttttttttttttttttaatttttattttttttattgatcattcttgggtgtttctcgcagagggggatttggcagggtcataggacaatagtggagggaaggtcagcagataaacaagtgaacaaaggtctctggttttcctaggcagaggaccctgcggccttcagcagtgtttgtgtccctgggtacttgagattagggagtggtgatgattcttaacgagcatgctgccttcaagcatctgtttaacaaagcacatcttgcaccgcccttaatccatttaaccctgagtggacacagcacatgtttcagagagcacagggttgggggtaaggtcaccgatcgacaggatcccaaggcagaagaatttatcttagtacagaacaaaatgaaaagtctcccatgtctatttctttctacacagacacggcaaccatccgatttctcaatcttttccccacctttcccccctttctattccacaaagccgccattgtcatcccggcccgttctcaatgagctgttgggtacacctcccagacggggtggtggccgggcagaggggctcctcacttcccagtaggggcggccgggcagaggcgcccctcaactcccggacggggcggctggacgggcagggggctgacccccccacctccctcccggacggagcggctggccgggcagcggggcgcctcacttcctagtaggggcggccgggcagaggcgcccctcacctcccggaccgggcggctggccgggcggggggctgacccccccacctccctcccggacggggcggctggccgggcggggggctgagccccccacctccctcccggacggggtggctggcccggcagaggggctcctcacttcccagtaggggtggctgggcagaggcgcccctcacctcccggacggggcggctggccgggcggggggctgacccccccacctccctcccggacggggcggctggccgggcggggggctgaccccccccacctccctcccggacggggggctgacccccccacctccctcctggacagggcggctggccgggcgggaggctgatccccccacctccctcccggtcggggcggctgccgggcggagacgctcctcacttcccagacggggtggctgccgggcagaggggctcctcacttctcagacggggcggctgccgggcggaggggctcctcacttctcagacggggcggctgggcagagacgctcctcacctcccagacggggtcgcggcctggcagaggcgctcctcacatcccagacggggcggcggggcagaggcgctccccacatctcagacgatgggcggccgggcagagacgctcctcacttcccagatgggatggctgccgggaagaggcgctcctcactttccagactgggcagccggtgcctggctaattttaaaactattttgtagagacagggtcttgctatattgcccaggccggtctcaaattcttggcctcaagcaatcctcctgtcttggcctcccaaagtgctgggattactggtgtgaaccaccatgccggtctggagtcattcttggctcctctctttttctcagtactagggtgactgtataattcattatataaacctgaacttccccagacaaataagttgtatggtctatccattaacccactccaatccatcagcaaatccagttagctctattataagagacatatccagcatccggccatttctcacctcctccactatcatcctggtccaagcattcatcgtgtcctgcctttatctttgcaatggcctcctagttgatcccccacttctagacttgccttttacccccaaatctgttttcacagcagccagagtaagcccgttaaaaataagtgagatcatgttactcctctgctgaaaatactcggcagttcagaggaaaatcaaaagtctttaaaatggcctacagcagcagtccgtttcctgcaaccgctctgacctcattcacatgttccccatctcttctcactccacgtaagctacaccagttctcgcgctctccaggtaagtcaagcacactcccacttcagcctggccttcgactttgctcttccccctgcctggaatgcttcccacataaggacagggcttcttctttcattcctttctggtcacaggtccctgactcctgtataaaaaaatgacatcacccactggctgctctgaaaagccatctttgcattgttccttgtccggctccttgctcgccgcagccgcctttaccgctgcggactccggacacttcatcaccacagtccctgaactctcgctttctttttaatcccctgcatcggatcactggtgtgccggaccatgtcagacgcagccgtagacaccagctccgaaatcaccaccaaggacttaaagaagaaggaagctgtggaggaagcggaaaatggaagagacacccctgctaatgggaaggctaatgaggaaaatggggagcaggaagctgacaatgaagtagatgaagaagaggaagaaggtggggaggaagacgaggaggaagaagaaggcgatggtgaggaagaggatggtgatgaagacgaggaagctgagtccgctaggtcaagcgggcagctgaagatgatgagaatgatgatgcctataccaagaagcagaagaccaacaaggatgactagacagcaaaaaaggaaatgttaggagggtgacctattcaccctccacttcctgtctcagaatctacatgtggtcacctttgagtattgaggcccgctaacccacccactgcgggcagtgccacccgcagatgacacggcccacccgcccaccgagggcagtgccacccgcagatgacacggcccacccgcccaccgagggcaatgccacccgcagatgacatgcgctctccaccacccaacccaaaccatgagaatttgcaacaggggaggaaaaaagaaccaaaacttcccaaggccctgcttttttccttaaaaatactttaaaaaggaagtttgtttgcattttttaatttacattttatatttttggacatattgttagggtcagccatttttaatgatctcagatgaccaaaccagccttcagagcgttctctgtcctgcttctaacgtcacttgtgatgtgaccatgttcgttataatctcaaaggagaaaaaaaccttgtaagacaagcaaaaacgacaacagaaaaacaatcttattctgagcattccagtaacttttttgtgtgtgcgtacttagctgtactataagtagttggtttgtatgagatggttaaaagggccaaagataaaaggtttcttttttttccttttctgtctatgaagttgctgtttatttatttatttattttttgcctatttgaggtatgtgtgaaacaatgttgtccaacaataaacaggaattttattttcctgagttgttctaacaacaacaaaaatgacatcagctgggcgcggtagctcatgcctgtaatcacagcactttgtgaggctgtggcaagaggattgcctgaggccaagaattcaagaccagtctggacaacatatcaagaccccatctctccaaaaaatacatacaaattagctgggcatgggagccacttgggaggctgaggcaggaggatcctttgagcccaggagttcaaagctgcagtgagctatgtttgcaccactgcactccagcctgggcaacagaccaagaccctgtctcaaaaaaatcaaaacaaaatgacaccaatctctatcaacatcacctccacctcatcccagctctccttctcttacatggtaaattaaattttctaacaatggctacagttatgtatgttcccacaagttcttctagaaccattcctcccgtcaagagagttttcttttttttttctttttttgagacagggtctcactctgtcacccaggctggagtgcaatggtgcaatctcatttcactgcaacctctatcttccggttcaatcaattctcatgcctcagccttctgagtagctgggactacaggcacgtaccaccacacccagctaagttttgtatttttggtagagatggggtttcaccatgttggccaggctggtctcgaatcctggcctcaagccatccacctgccttggcctcccaaagtgctgggattacaggcatgagccaccacacctggccaggagagttttctttctctcgccttgaatatgaaccagcctttagtaactggcttctaataagcaaactgtgacagaagcaacgctgcaggacttttgaggcccgctcttaatttgtgacacagcctccacctgactcttcctcttaggaccttctcctttggaacctaccacgtccttggagcccaaaccagcccacacagagaggagaccataaggagaggtccatgtggagaggaattgaggcccctagccaaccaccagcatgaactaccaggttcacgagagaatgggccttcagatgaagcccaggccccagcctttgagtctttcagctgaggtcccagccatggtggggcagggaaagctgctcctgttcccctatgctaggccctgtccaaatctttgacccacagaatccataagtttgggcccatctagttgcacggtcatagtaaccagaacacctcatttaatttttctctatagagtctaacataatgtgtatttacttgcttctctattgtctacccacacccccctccaagagaacgtgagttccttgaaggcagaaacttttgtctattttttctagcctcagtatctagaaaagtacctagcacacagtgagcacttgaaaaatatttgttgaacaaatgaattaaagaaaactgctaattaaagaaaactgctccttactataattcgcaacaccttctgctgaggcatgcgaccttttcctgaagaaagtgttctctggtgtgttttggaccagctccctgctaaaaaatatctcttgtcagccatctggaaaatgataaagttggatccatacctcccactatacaccaggaaatagtccaagcggatcaaagatttatacatggtaaaatgaagccattcaagtcctagaaaaaagccccgtagcattctgatgtcgccttggagtaggaaagcctttctagctacgactcagtctccagcagccattaaagaaaaagatgggctgggtgcagtggctcacacctgtcaccccagccctttgggaggccgaggcaggccgattgcttgagctcaggagttcgagaccaacctgggcaacatagcaagacatctctactcaaagaaaaaaaaaaaaagaaaggaagaaagaaagaaaaagatggatcaactcaaagtacataaaaataaaaaacttctgcttggtcacaacaacaacaaaacagaatgagcaaaatcaggccgggcgcggtggctcacgcctgtaatcccagcactttgggaggccgaggcgggcggatcacgaggtcaggagtttgagaccagcctggccaacagggtgaaactccatctctactaaaaatacaaaaattagccaagcgtggtggcgggcacctgtaatcctagctacttgggagactgaggcaggagaattgcttgaacctgggaggcggaggttgcagtgagccgagaccacgccattgcactccagcctgggcgacagaacaagactccatctcaaaaaaaaaaaaaacaaaaacaaaaacagaaaaaccaaagaaacaaaaaacttctggagattaggcagaaaaaaaagaccaagctaggcagaaacccagtgggaaaatggacattcaggcaggcagttcacagaaaaggggactataaagtcagccctctgtatccaagagttctacattgtggattcaaccaacgacaggttgaaaatatttggggtcaggagcagtggctcatgcctgtaatcctagcactttgggaggctgaggtcggagaactgcttgagaccagcctgggtaacatagtgagaccctgtctctacaaaatattaactgggcgtaatggcacatgcttgtagtcccaacttctcaggaggctgaggtaggaggatcacctgagcctgggaggtcaaggctgcagtgagccaagattatgccactacactccagcctggacaacagaatgagatcctgtctcaaaaaaaaaaaaaaaaaaaaaaaaaaaaaaaaaaaaaaaaaaaaaggaaaaacctaataaaaataatataaataaaaaacaacaaagcataactactatttatatagcatttacatagtattagctattataagtaatgtagaaatgatttaaagtatatggaatggctggaagtggtggcttatgcctgtaatcctagcactttgggaggccggggcgagaggatcacttgagttcaggagtttgagacaagcctggaccacatagtgagacctcatctttaaaaatacacatatatgtgtgtgtgtgtgtgtgtgtgtatctatgtatgtctatatatctatatctatatctatatctatctatctataattaggccatatctatcaacattataaaaaccagcaacttacatcataatgtgccaaacttcctgatatattttgaaaagatccccaaaactcctagaagttttatatctatatctatatatatatatatatatatatatctccatatatatatatatatatctccatatatatatatatatatatatctccatatatatatatatatatatatatatatggacgtatatatatacacacacacacacatatatatatatggaaggatgtgcgtagtttatatgcaaatactatacctttttttttttttttgagatggggtctcactctgtcacccaggttggagtacagtggagcaatcttggctcactgcaacctctgcctcccaggctcaagcgatcctcccacctcagcctcccgagtagctgggactacaggcctgtgccaccagcctggaaaattttttgtatttttggtagaggtagggttttcccatgttgcccaggctggtcttgaactcctgagctcaagtgatctgcccgccttggcctcccaaagtgcggggattacaggtgtgagccacggtgcccagccagtactacaccattttacatcagggacttgaacatctgtggattttggtatctgtagcggtcctggaaccaatcccacgcacatagactgtacaaatggcccttaatcatatgaaaaaacattaactctctctcaaatataacaaaaatataaaattataccgaaaacctatttcttccatatcagattggcagacatcccaaaccatagcaagacaacactggcagggtggtgaggtcacaggcactctcacacatcacaaacaatacaacctctgggtagggtaattaggctgtatctatcaacattataaaaaccagtagcttacatcataatgggccaaacttcctgatatattttgaaaaaaacccaaaactcctagaagttaggcagagaaaaagaccaacaccccagtggaaaaaggggcgttaaagcagttcacagaagaaggaactacaaatgacccttaattgtatgaaattgttagctctaaccattgcatttctgggaatttatcccacagatatatttgcacctatatgaaatgacatatgtatattactcattgtagcattctccatagtagcaaaatattggaaataacgttactgcctatcaatagaagactgatagcctaaattatggcacatccatataatacaataccagatagctgtaaagaagaatgaaaacacttttttttttttttttgcgatggagtccactctgttgcccaggctggagtgcagtgtcacagtcttggctcactccaacccctgcctcccagtttcaagcgattctcttgcctcagcctcccaagtagctgggattacaggtacacaccaccatgcccggctaatttttttgtatgagaacacttttttgtactattttggaaagaaccactagatgtactattaaaagaaaaatgcatatacacctactatgtacccacaacacttaaaatttaaaattaaaaaaaagaaaaatgcaaagttccaaacagtatgtataatatgctatctgctaattaaaatgctaaaagaagaagaaacagtggacagcaagaatacacacattcatgtttgcttatatatgggtaaagaaactcaggaaagttacaggaggagctaataacagtggttaattacaatggtagaggagaggcttggcagataagggactcgtttgcagatatgactttcctttgtgtacatttctatatattattttacttcttctgaaaatgccacataatttgcaataaatgattcactccttagctccaaaagcaagtcctttatcaaaatgcaaatgttccagagggatgtagccagattctgtggaccgccgtctttttcacccttaagaatccgtcgctatgatttctcttcctctgcttggagacctttagagagccagcctgcagctgctcagagcattgactactaaacagctcacagttgctattgctgaaaatgcccggtggttatgccttgcctgaccaggggtagcccacagctgatgacaggcccccttgcctcaaggtgggacaacttcggtggtgccattcatatccagagctgcctggaatcaggccgaggctggacatcagccgaccccgcatctttgctgagtttattcctctgctgtacttccctcgcttccctcacctccttcttggtttctcctgagagcctccctcaataaatcacttaccccagaatccttgtctcagactccgcttctaggacccaacttaagacattcacaaaataaatcacattgatggaaaacagatcccattctccaaaatgaataaccagtaggcacttgtgactagcacaagcatcagcatatccacatggtgctaaactaacaccaacccaaagcagatagtgctgggtggactcggtacaagttaatagctcatgggtctccatccccaacaccttcagacccaaggctccagggctgccagcctgagaaccctaagtcatgattttgggcactttggctggatttcctagcaactggctgagagcaggacaggtaaacagagttgggaggaggaagcaaaaaaggctagagtggacatcagttgactttgcctgccatggtagagactttcagtcatccaccataatccatccccattctgctgcacagaagtattgtggctgagacacctgcttttctccacccctctagttaatgtgactaaattctccctatggaatgggaatggaagggccatacccaggccagtgtcttcaggtaggggctgtgacccttccacacctgtaccagacacaatcatcatctcactgggttttgccagctttcaggtctatgtgctgaaagctgcttacagctaacctctgcagattttcctggcacaggaggcatgcttggccagtgcacagggcaagttggaagggccctaatgtcagcagccttcaaccaatgatggatggaaagttgcagacagtgtcctatgcatctgcagtgggataactctgagacgtgtgctgtactgcctcctagagggcccagggtgattaagcaccagttacccacagcagtaacttccttgattctgttccccacatgggcacttttcttcctgtcacacctccccaatcccctgcagatactttctgggattgcttcctaaacaatccacttgaactttttttttttttcttttttttgacatggagtattgctcttgttgcccaggttggagtgcaatggcacgatcttggctcactgcaacttccgcttcctgggttcaagcaattctcctgcctcagcctcctgagtagctgggattacaggcgcctgccatcacgcctggctaatttttgtattttcagtagagacggggtttcgccatgttggccacgctggtctcaaactcctgacctcgtgatctgcccgcctcggcctcccaaagtgctgggattaccggcgtgagccaccgtgcccagccccacttgaactttaatccttgcctcggaattggcttctggggaaaccaaaaatatattaaaaaaagagagaccaggaccttaaaaagagcccaagttgttgagctccctgccaagtcacccccaggtatctctgcccaccagcttgcatgagccagatcctcagtgcaggtttttccaatcagtcatttgttcttccacccaacgctcaagatttgcttcttcaagacaactctctgatcagctgagacccatagacacccagcttctaccacacatatgatggcattatcctagggcatggcagagcaacgcaagggaaaactctgggcccccaagtgatgtcatggaggagaactctcaacccagaactactacgtgagaaacaacgctctctcttctttaagccataggtgtgttgggaatctttgttacagcagcacgcctgatcttttgttttgttttgttttgttttagagatggagtcttgctctttcgccaggctggagtgcagtggtgcgatcttggctcaccatgttggtcaggctggtttcaaatccctgacctcaagtgatcctcccaccttggcctcccaaagtgctgggattacaggtgtgagccaccgcacccggcccagccatgccttgtcttaactagcatagccgcccaacgtccacttcttttggccatgttgtcctgattctgctggagaatccctttcccactgctcccagaccagtggtgtagctgacctgcgctctctccactcaattcaggggagggaggggtttaggcctgggctaagagagctgcacatttcccagggcacagtgattagttgagggtgggtcccagagccaaatctgcccaagatcttagcctgaaagagaaaccctcctgctgagtgactgcactgtgaggcagaagtccagagctgtgggtggccatccagcctccatttgcgcctgcctgagaaagaagccaccatgggggaaatcgagctaaaagacggagagggaggtaagagaggatgacatcacataagcaccagatctggccacccctgaaactggaacaaccctaagctttacagctactacattcccttttctgctgaagttgttttacactgggtttctgtctcttgcaaccaagagctctgttaaataaaaacctgaccctaaggagaacgttagctggttcacaattccctgtgcaaaacaggcacaggtcagctgccccagcctgtcgtttggatattcctttctaagaacgctcacttttgttgtctacatgacccagataaccaaggagaaagcaaatcaaccgccttccagcggcgccttccttggcagcaagtgctaagagagaacacaatgtgagtactctgccctctggagtcagggttgatcctcagcacttgctgtcctgggaggctgcacctgtgacacttgagtgccaggttcaacccctactgctgctgctgctgcctgaatggggccatttagactgttgagtgctacagcctcagcccaggaacccggagcttcacatgaggcagagcagggccccagggtccctgaaacttgccagttcaaacagcagaggggtgaggactccccagtcagccctggtctcatacctgcctctgcatggtcccagtccagcctgaggcctttgctttcttttttgaagggaaggtgaggagagagggggaaaatagaggtgttctgactagacttaggattcctggcctctgcctctgaccgccagaggacagcctctgcagttgcctcatctactcatgaaaacaggcctgtgaccccaggggtgctctgaggattcttccagaaaacatctgcccagctaggactacctagctcactgcccaaaaagggttcatttcctttccttctgaaacaaaagcgcttaattggaagagaagcattgactcaagctataggatatgccacttaaaatgtccagatcttggcacaaggcctggcgcacagtgtgggagagaaggagagaagaaggtggaaggaaaggagggaggggaaagaggaagcagggagggagaaaataagacaagggcctcctcatctggatgcttccctagaccaagaagtggcccaggtggtgcccaggggacagggagtgggcaataaaagacaatggggtgtaggtgatagggtgtagatgatcagggtataggtgatcaggatgtaggtgatggggtgtagatgactggggtatagatgattgaagtgtaggtgatggggtatagatgatcgaggtgtaggtgatggggtatagatgattgaggtgtaggtgatggggtgtaggtgatgggggtcaaggtgatcaaggtgtaggtgatggggtgttggtgattggggtgtaggtgatcagggtgtaagtgatggggtataggtggtggggtgtagatgatcggggtgtaggtgatgggtataggtgatggggtatagatgatcaggttgtaggtgatcggggtataggtgatcaggttgtaggtgatggggtgtagatgattgggatatagatgatcgagatgtaggtgatggggtatagatgatcaaggtgtaggtgatggggtatagatgattgaggtgtaggtgatggggtatagatgatcgaggtgtaggtgatggggtatagatgattgaggtgtaggtgatggggtgtaggtgatgggggtcaaggtgatcaaggtgttggtgatggggtgttggtgatcggggtgtaagtgatgaggtataggtggtggggtgtagatgattggggtgtaggtgatggggtgtaggtgacgggtataggtgatggggtatagatgatcagggtgtaggtgattggggtataggtgagcagggtgtaagtgaaggggtataggtggtggggtatagatgatcaggtgtaggtgactggggtttgggtgatggggtgtaggtgatggggtatagatgattgaggtatcggtgatgggggtcaaggtgatcaaggtgtaggtgatggggtgttggtgattggggtgtaggtgatcagggtgtaagtgatgaggtataggtgatgcagtgtaggtgatcagggtataggtgatgaggtgtaggtgatggagtgtagatgattgaggtgtaggtgatggggtataggtgattggggtgtaggcaatggggtgtaggtgatcggggtcaaggtgatagaggtgtaggtgatggggtgttggtgattggggtgtaggtgatcagggtgtaggtgatggggtataggtgattggggtgtaggcaatggggtgtaggtgattggggtcaaggagatagaggtgtaggtgatggggtgttggtgattggggtgtaggtgatcagggtgtaggtgattggggtgtaggtgatcggggtgtaggtgaccagggtataggtgatcagggtgtaggtgatgggatgtaggtgatcagggtcaaggtgattgaggtgtaggtgatgggatgttggcaaccagggtgtaggtgatcaggatgtaggtgatggggtgtagacgatcagggtgtaggtgatgggctgttgctgaccagggtgtaggtgatcagggtgtaggtgatccgaacttcctactcaattcaggcaacagctcccagcctgaggcaaataccccccgaggcagtcagggtctcacctcccatggctctgacgcaggcctccaaggtgaggagatggaggtagcagaggtcacttcactcagctgtcacacaccctgagggaactcctgtcactgttatcccacctgcaagtgaggagccagcatttctcatgctccagggttggccacagagcccattcaagggagggagaagagccttcggccagcgcatcctaaccgcagaaagccaagacctctgcagaaaaagagaccaggcccataaaaagagatccatgagttgagttccctgccatgccacccccaggcatctctgcccaccagcctgcatgagccagcccctcagtgcaggtttttccaattggccgtttgttcttccacccaacactcaagatttgcttctcagcctggacaacatagcaaaaccccatctctacaaaaaatacaaaaattagctgggcatagtggcacacacctatagtcccagctactcgggaggctgaagtgggaagattacctgagcctgggaggtcaaggttgcagtgagccatgatcatgccactgtactccagcctgggtgacagagtgagaacttgtctcaaaaacaaaaaaagagaggaagatctgcttcttcaaacccacacaactaatataaagtaatcaacctccccacctcaataacctgaagttaaacatcacacaataagccctgaacagagagctgtaggtcaatgttccattttgcttttaaaagcttcacaagaacatttcatttattaaaatagtttctgtaaactctttcagaataacaaaattcacttgccttgcttaaacagcatttcaagtagaagtatttttatttcaaggcaccataaaatgatgatctctctaagaaatacctctccttccgtgtgtgaaaatccttgggggaaaaaaaaatcccacacggtgttcttggccatcaggatcatgaaaacaaactttggtgaatgtgagcaactgcgccagacaggacacaggttacagggcctgacgtcactaacggcaactgacaatcttggaatggaccctactgctgatgtttcaaaaggacacagaggtgaactggtcacttctaattaagaagagccagtggggtgggggaagctgaaaaccaaaaatccacgtagacatacgtggcagtgtgaacgtctgtcctccccttccttctcctcacttcctctcctcctcctcactcaggctggtattctcctggtgtgcggatgtcagcttgccctgcagaagggctgccagttttttagatgtctttttgagaaacgagctgcccggatgggcactgttcacgtgcaggtacaggtcctcctgggtggggcccgtgtagccgcaatcctcgcagacgtagagcttgtcccgccgctgcttataggcatactgctgctgcaccccatggattttcttcaggtgggactccagagagcagcgctgggtgaaggctttattgcagacgttgcatttgtagggacgaatgcctgaaaggatgagggacagacacagcatcggttggtcatggccaagccagaaccacccaactatgaagccagtaaaagtcatgccatgaccaaggattcatggcagcatgaggacaatggttacagcaggagagaaaactgtctacaaaaaatcatagcatccacctgagtaaacctaacacaaacagatgccaacatagaaaacaaacaaacaaacaaacaaacaaaaccaccacctgctttagggaggaagatttttattcttccaactcacataccttaatgttttcatattattgtgagcaaagtaaacttttaaaaaaaattaattcgggccaggtgcagtggctcacgcctgtaatcccagcactttgggaggccgaggcaggcggatgacttgaggtcaggagttcgagaccagcctggccaacatggtgaaaccccgtctctactgaaaatacaaaaaactagccaggcatggtggcgcgcacccatagtcccagcaactcgggaggctgaggaaggagaatcactggaacccaggaggtggaggttgtagcgagctgagatcgagccactgcactccagtctgggcaacagagtgagactccattaaaaaaaaattaatttgggtattcccagaaacagagcctgggacaaagattccagtacaagtagtttatttgagaggtgatcctgggaagaacctatagggcaacgaagatgtgaggcagggaggggtaggatccagtagaggggaagctacccagccagttacacggtggacaaccagggtccagtcctctgtgcaacgcagggagacagtgtggcacacaccttggcgtcatcccacccctccaggagctgaggtcagtcactggctgccggctgctcctgggtggttttgattctccatccccagcacttctgcctgccttgtgcagacagactgggctccagcagggaacccctcaggcagaggtgcaggggtggacagttgccacttggacaggtgtgcccagaaatggcagatgcccaggccattggcaggacactaaggcatttgtggcagttatgaaaatcatttccaaacaagatctcatgctggcattagaactgggctaacactggacctgccttctagctgagatatcacaggtacaatatagagcagggagctcagcctcatcaaagcattgccgctcctacctccatgattggtactcaccctgatgtgtatggcagaatgtcagataaagaatataaacatggactctgtgtgtgtgcaacagactatttagatgagcttggacagtacagtattttacatacttgccagagcctcagaatcacctggagaacttttgaaaatcttaactcacttctcctaagaccaactcagtgggtctggggtaggaatcaggaatccatttttttttttttttttgagacggagtctggctctgtcacccaggttggagtgcagtggcgcaatctcagctcactgcaagctccacctctcaggttcacgccattctcctgcctcagcctcccgagtacctggaactacaggcacccgccaccacgcccagctaattttttgtatctttagtagagacggggtttcaccatgttagccagaatggtctcgatctcctgaccttgtgatctgcccccctcggcctcccaaggtgctgggattacaggcgtgagccaccgcgccgggcccaggaatctatttttaacaaacgtcgctggatattccagtgttcaacttggctttcaagagccacaggttagggtctttaagattctggttgtggtcttgcctgaggtcaggtaaggtagtggcagggcagagacctcagagcacacccagctcagcaccctacactggcgaaggtcaccccttgagccagtggctgaataggaggctcacactcaaaaagaaggatgggacttaaaggtggaacaacagacgctggggactaccagagggcggacagagggaggggccaagggctgagaaactccccattgggtactacgcgcactacctgggtgacgggatcatctggacctcaaatctcagcatcatgcaatgtacccatataaacaaacctgcacatgcaccccctgaatctaaaatcaaagttgaatttttttttttaaggttgagactggtatgtgacagaagcaagcacactaagcagaatctcacatgacagattctaggaaattcccgtaggccatatcagcaagttttattgggctttaagaaacgaattggctgggtgcttcacagtgactcacacctgtgatcccagcactttgggaggctgacgtgggcggatcacctgaggtcaggagtttgagaccagcctggccaacatggcgaaaccccgtctctactaaagatacaaaaattagctgggcatcatggcacatgcctgtaatcccagctactggagaggctgaggcaggagaattgcttgaacccaggaggcagaagttgcagtgagtcgagattgtgccactgcactctagcctgcgcaacagagcgcgactccgtctccaaaaaaaaaaaaaataagtaaataaataaataaataaatgaaattaagaaatcaccatagtaaggtttttttgttttttgtttttgagactgagactcgctctgtcgcccaggctggaatgcagtggcaccatctcggctcactgcaagctccgcctcctgggttcacatcattctccggcctcagcctcccgagtagctgggactacaggcgctcaccaccacgcccagctaatattttgtatttttagtagagacggggtttcaccgtgttagccaggatggtctcgatctcccgacctcgtgatcctcccatctcggcctcccaaagtactgggattacaggcgtgagccactgcgcccggctgtaaggtctaacttaggctctcaaagagaggttatggctgtgaaggagacacacgtcacaaaagcatggaagttgagagagggtgaatatggtactgggggtgcatggagcatgaagaggccactgccacagccacgagaccatcctagagcctagagacaggagggatgccacctggagaaacccgcagaccctgtacagattcccgggcctgcctcagggaccccaggcactaggtcaggggctgggactaggaagctgtagttttatttttaatattttattttattttatttttttgagactgagtcttgctctatcactcaggctgaagtgcagtggcataatcttggctcactgcaacctccgcttccctagttcaagcaattctcctgcctcagcctcccaagtagctgcgactacaggtgcccgccacaacagccatctaatttttttatttttagtagagaaggggtttcactgtgttggccaggctggtgtcaaactcccgatctcaggtgatccacctgccttggcctctcaaagtgctgggattacaggcatgaaccaccgtgcctggccctaatagttaccttttattaaaatataaaaaataggctgggtgcggtggctcacgcttgtaatcctagcattttgggaggccgggctgggtggatcgcctgaggtcgggagttcgagacctgcctggccaatacagtgaaaccccgtctctagtaaaaatacaaaaattagcctggtgtggtggcccacatctgtaatctcagctacctgggagaatgaggcacgaaaattgcttgaacccagcaggcagaggttgcagtgagctgagatagtgccaccgcactccagcctgggcaatagagcgagaccctgtctcaaataaatacataaataaataaacaaaataaataacaaaaggttactattaatagttgtttaaatttaaaagtaatataccccccagttttatggtgaaaaacagcagtaaattaaaaaaaataaaacagaaaagatccctttgtcaccccatgcacctctccttccctagtcctaactcgcaagtttcttgtgatccttcacattttctacaaattatatatatgtacatttttattttattttattttttgagaaggagtctcactctgtctcccaggctgcagtgcagtggcacaatgtcggctcactgcaacctctgcctcctgggttcaagcgagtatcctgcctcagcctccctagtagctgggaccacaggtgcctgctacaatgtccagctaacttttgtatttttttagtagagaccgggtttcaccatgttgaccaggctgatcttgaactcctgacctcaggagatccacctgcctcggcctcccaaagtgctgggattacaggcatgagccaccacgcccggcctacatatgtattttaagattaataaatatatgtcatctctgggtgttgcctgagcaggagaatttgttaaagcttccccaggaggctctagtgtgcagccaagtatgaaaacgagagttctaaataaatgcacattcacattggcatatgcacggatgtacatgtttccgaaacataaacctggggttctggagagacggtctggagggtggtgaaggcttacacttgccattgcgtccctgtctgtactacttcccatctccaaccacctgccagtattaataataataattttcgtactaactgtggttccttctgggcagtgtaatgacaatgaatctcccaccttttctcttaaaactattctaggatgggtgcatggctcacacctgtaatcccagcactttgggaggccaaggcaggaggatctcttgagtccaggagttcgagactagcctggcgaacatggggagatccctgtctttacaaaaaagtaaaaaattagctgggcatggtggcatgcccctgtggtcccagctactcaggaggctaaggtgggagagatcactggaacccaggaattcaaggctacagtgagccatgatcgcaccactgcactccagcctgggcgagagtgagaccctgtctcagaaaaacagaaaacaaacaaaccaaccctcaccaatcaaggttaagaaagttttaaggcaatattttaaaaatcaaaatatcgaatgaatggatgaactctgttggttccaggaaagaaaggccacatctttgggactagttttccacataggcaaggactacagactcctctcctaaggaatgcgcccgctctagctttcatgtttgcactgtaatgcagactttgtgttttcccggccttctgggcccatgcagcagcgagcagctggctcccactacccagtagatcaagcggcaaacccgatttccaaccttcagctcatcagagcagaaatccacccagagattagttgctcctttcactagttagtagaaataaccgactactgttttaaaacatccaaactaaaaatatggggaagctggcacacttaacatcaggctttaacctggatgcaacaaactcctggaggttcccatcctcaaaggtgatctgcccccgaggagaggccagccaggccaccactcagccccatgtgcacagggccacatctccttcctctcttcagtcaacacagcctctgagcatcttctatgagcagagtacccagcaaggcctggatagcaaacgctagaagattccaaagccctgcatcatgcaaacaagagagatgatggcagtgggggctttttttccagggagtgggtagaattagagcctggcttggaagaggagtgactcgcagacagagatggaaaggagacataggcccagaaagctccagttatggcacttctgacttttgccaaatgcactgctctgtgccccagcacttctgcttccccatttgctagtgtaaacgccaccattcacccctcattcactggtgcgggcactgccatgcggcagccccttggtgaccctttctaggcttgggaacaagcacctccctcccagagcacccccatcacccacacattcagggggacgtgggtggccagagaggagccctgggcaagacggactgatgccaaggcccctcccaccactgaggctcacccatcttggtgctctcacgcaaaggccaaccgtgcctgtgtctaaagcaggacatgggaactgaagagcaccacccatgcgctagacgtcattaacctactgacacccacacgactgtgagtccaaggccaccgaagagccaggctgcggatctgctgcttattaactgaaacgggggcggctgctccagcccgaaaggccgtttcctcacctgtcacaggggtgtcatagctcttgcatggctgctgtgaggattagccgagatagactaagttctcaatgggatacagctcaacataatgcagataagcctcattcgtaagctggctgctgaccagcctggccaatatggtgaaaccccacctctactaaaaaatacaaaaaaaatttagccgggcatggtggcgagtgcctgtaatcccagctactcgggaggccagggcaggagaatcgctggaatctgggaggcagaggttgcagtgagctgagatggcgccactgcactccaacctgggtaacggagcgagactctatctcagaaaaaaaacaaaacaaaaacataagctggctgctgggtacatgagtatttcgcagatttgtctttaaactgtacctatatgtatacttttgtacgtgttacttatttcacaacaaaaggaaaggataattttttaaaatgtggctggtggaggagaggggggactgctttcgccgtctgcccttttgaattttgtaccatcagcctgtcctacctagtccgaaaaatattgtttattgggttatcaaaaagggtttgttgttttccatttttttacccctaatagcaaatcaagcttcgtgccatacatcctcaaggaaaattctacactttggaactttctagttgctttccttgctatagctcaactgctcctttactgaactttatccgaaggtgaacttcagcgagaagatttttacaggcatgcttgtgggagtggacatttacggcagcctccccggaaggcaatttggcaatggccataaaaaaaaatcacactgtatctaccctttggcccagcaatttcacatcagggaaattatcctacaggaagactcacacagggaggcgaaggatatacaagatatactcatggtaggattgcctgaaatgaaagaaaggaaagaaggaaggaaagaagaaaggaaggaagcgaggaagaagggaaggaaagaagagagggaaagaaagagaaagaaagaaaggaaaggaaaggaaggaaggaaggagagagagagagaaagaaagagagaaagaaagaaaggaaagaaaagaaaagaaaaaagaaggaagggaaggaggaaggaaggaaggaagggaggaaggaaggaaggaaatctgcaaatggaaacaaatgtcatcaattgaggaataggaaaagtacagtccctcgatactggaaattttgtcatgatttcttttattattattattattattattttgagatggagtctcactctgttgcccaggctggggtgcagtggcaccatctcagctcactgcagcctctgcctctcgagttcaagcgattctcctacctcagcctcctgagtagctgggattacaggcgccagccaccatgcccagctaatttttgtgtttttagtagagacagggtttcaccatgctggccaggccggtctcaaactcctgacctcaagtgatcagcccgcctcggcctcccaaagtgcggggattacaggtgtgagccaccgcacctagctccaagatatatattatgtgaaaaagcaatatacattaaaaacttttgggaaaaaaattaaatggtggaactggggcttggcatgtgaagggagtttacatttttttctttccttttatctcctaatgaacatattacctttttagctaaaaagtaaattaagataaaatacaaattaaaaataaaacaatgaagcgagggtttgttaactggaccaggcaattccgcatgacagcattcaggccactaggggtggaggtgacttgactctttcttctccatctggcccactccaaacatctcccaatctgcatttttcccaatctagtcaatccttccctttgggctccaaacaaagacaccattgttttctcttctttaatcaagatgggatttgtgtgccttctcctccctctgaatgtaggccccgatggaagataaggacagaaggcgccctagagggtggggccggtgccccctccccacctccctgacctcagaattggaattcctcggcttcaccctgtggaactcagcagcttccccaggaatggcatgagccctgaactgcctcctttattccagccagcgttgttaagttataaccagcatgggtttatgacctccctgggccacgtggctccctgcaaagccttagctgggagccccacggatgtgtgtgcccttctcacctgtttatggccctttacgctgtcttctctgcagctttttatattgtctgaaatcttttacagaatacttagtcattttacaaatgagcaaaataaaacactttccataaacgcgggacttaaatgatgggcctggcacatcgggcacttccgaagcaatagtctgcatttcctgcatgctcgctcctggggactctggcactgccggtccactgaccaccctttgagtagggagggtgtggacactcagtgcagagtcttgtgcttgcaagggctggttattattttttcctctaaaataaagatctcctccctctcctcccaaaccaaatcgtttacttcaacagagaaccattcttaggaagcatcctagcctgttcaacctaaaacacttaaataaatccgaaagaatgtcctataaatactatatatatcctataaatataaaggcccatgtttttcacaggctatgaactgaatacacattcatttcctggaagctcatgtcccctctctctattttgagctggtcagcaggcagaatttcccatgttgtcctcagtgatcctgtcaacttcactgaagtacagcaagtccctcaattatatagtggctgctgctggcttcccatccagaccgcttttctgggtcagtgcatgtccccagctgtcgtgtggcttctggctgtccccttctttaaggaatcagcactgggcaagtgaccttccagatgctcaggagtgtctccctgacctcgcccagggcagacacagccctcagccaacgtcagactgaaatgggggtaaaaaagtccctgcccccaccttgcctgtagcagatccatcctggagtccattcacactcctgatcccccctgggatgaggtcgaggctgcactccagctaacagcaaaacccatgctcatcctctgccctcacaggctccacttgacagccctccctcaataaaccatttgatgggaagccgcttccaaaccccacctaagataatttggattgaaaatagccacttgttttcacaaaatattacagagtttttctgcacaggtcagtttctctcttccagtcttcagtaggacaccatttaactaacactcccttcccctctttctctctctctctctctctctctctcacacacacacacacacacacccctccgatttacctttcttgggtgaactcacagccaaaaaagaagtcctaatcttttctttcgtctacttggatattaatgtaagacatcttcaggttctagtttccctggatcttttccaagatatttctttgtgttttgagtctttccttagatatcctgtttgctcagtagttgcaggggattggaagagatgggggagtcgggggtggtgcagattaaccctgattctctagctcactgtctttgcccacctcatcaatattatagctacaattctccaacaaagggtcctcggccctgggtcctgggtcctgggtccaggccatggcctggtctaattggactgcaaacaaacatacccctcatttaactatctgtcgtatttatgttaagtgtctatatctttgtttctggcctaaatacaacatttacttataagaaccaatagcaaaaatacaacactcacagctcaatcaaaggcaagaccaggccaggcgggtgcagtggctcacgcctgtaatcctggcactttggaagggtaaggcaggctgatcatctgaggtcaggaagtcgagaccagtctggccaacatggtgaaaccccatctctactaaaaatacaaaaattagccaggcgtggtggcatgtgcctataatcccagctacagctacctgggaggctgaggcaagagaatcgctggaacccaggaggcagaggctgcagtgagccaagacgggagccactgtactccagcctgggcaacagagcaagactccacctaaaacaaaacaaataagcaaacaacaaaggtaagaccaaattcccactgaattcaagtaaggtcttttggagctggtgaagtttgttcacatgaactaaaacatcatctgagaaacccacatttttgcactttgtaccaactgtctcttttggacagagctgaagagatggctcggcaagcctgttcctctgagcttgccaccagctgatgtgtcaggaagcccccggctgctctttctggtcttttattacatggagacacaccttcatcagaaaataggtcgggatggggtaaataggtctaaaacatttccatagttccatttgttcatccctttaagtgtcaaaatgatgattaaaatttttaaaggttatcttagtgccatccaatagaaattaaaatgcaagctgctttataagttaacgttttgtagaagcctcaaacaggtaggaagaaacaggtgaaatgaattttaatgctatattttgtttaactcattatgcccaaaatactaccatttcaatgtaaaatccatattaaaaattgagatttttggccgagtgcagtgcctcatgtctgtaatcccagcactttgggaggctgaggcgggcagatcacctgaggtcaggagttcgaaaccagcctgaccaacatggagaaactccatctctactaaaaatacaaaattagccaggcatggtggtgcatccctgtaatcccagctactcaggaggctgaggcaggagaatcacttgaacccgggaggcagaggttgcagtgagccaagatcaagccattgcacttcagcctcggcgacaagagcaaaactccatctcaaaaaagaaaaaaacaaaaaaattgagatttttacaccttctttttttgcattacaacttgaaacttagtgtctcttttgcctatacaacacatctcaatctggaccagcccctcctctgagactcaggagccacacacagccagtggccgccggaccagccagcacacctctaggtttttcactcctagctgcctcctaagccctagcctttcccctaaggtgataactgcgaaaccctttgggaaaacgtcaggtggaaggtattttcattcactaacttaaatgattttcagctccctcacaggagtcactagaagagtaggagatggagaaaatctgagaacctcaggttgggagtctgaaggggtacaggcaccccctttcttgcttcctctgtgggcagaggacatcttggcaccactgaactcacacgctcacaggctcctctacaacctactaaaccccaagctgaagtgtgcactttgtgctactaataggtctgagtttccctttatctcaccttcctctagaagcaagcaggcttctagaaactgcaacaggccgggcgcggtggctcacgcctgtaatcccagcactttgggaggccgaggcgggcggatcacgaggtcaggagatcgagaccatcctggctaacaaggtgaaaccccgtctctactgaaaatacagaaaattagccaggcttggtagcgggcgcctgtagtcccagctactcgggaggctgaggcaggagactggcgtgaacctgggaggcggagcttgcagtgagccgagatcgcgccaccgcactccagcctgggcgacagagcgagactccgtctcaaaaaaaaaaaaaaaaaagaaagaaactgcaacagggcaggctggtgaggcccctgcctcagggggaatgctgaggaaggcactgggaggcaaagagggcagagaaggagaccctacagaggataaaagaccatgaacttcagggccagccagttctggttcccagctccaccactgatgggttgtgtgagctccctgagcctggtttcctcctctgcaaaaggtggagaacaacagcactgactgctttgggtaatttgagatgacaggataaaggccggaggcctggcatgaaggagagtgaccgtgtgtggcttgcttctgcctgcagggctgtgttactctctgaagggtcccctagtctctgccgagccaccctcctcacttgctaaatcttctgcctcccagggcggatgccccactcatatccccttagcagatcgccaggcatctcagatggttcctgcatctctctgcctaaggatgctctccaggcctgcaaagggctggggtgggcagagggtagggagaactgcccaggagtcaggaggtccaggatggacacccaaggagggatgggggttgattgagcaacctggggtgcattctatatggttcttcagaggatctccagtgggattgagcctccgctgcccgtagtgataacccactcattattattgagcttttattggctgtcttccctcctgacctcccctccctcctctactgtgttttctgggatcacctcccaaatacattgctcacatccaaatccttgtgtcgcgtctgcttcttgggcaacccaaactaagacactcctcattagcaacgctcttcctccttctgtcctgctgtagaaagcttgctcatccttcaacgcccagctgaaagactaccttttctaagaagcccccctgacatgcagttagaaacaaggcacctcccaggactcccctttggcatgtgccactttttcttctgtctggcatatcggctgtttcacttgtctcacagtcagatgtctgagttattcctccctatgttggctgagagctccatgagcacagaggtgaatcctagggcctgttacacatcaggtcctcaggaagcctctgccaactgttgcaattttactactaataatagctaatatttactacgcacttacaatataagaagcacttttatgtaattctggccccaaaacctcacaaccatcactttaagtggcaagtattaaaatgatcacacccattctagagatggaaaaattaaggtgaaagacgaataatttagaacaagtctcacagtcagctaactcagatcaggagttcttaactactatgtgaccgcctcaacttgtaaactcttctctgagaagctgtcagtccctaatatttcccttagtctccagcaatggagaattaactcaatcacaggggaggcaaggccatcagctcagtgtttactccagctgaaggtaccaacagctagccatgcttcctgggccccctgcgttgtgtcctagaagccagggtgggggagtgaccacagagtccatccaggcagggaatgccctcaaggacatcctcagagatgatgtccttgagacaccctcaaggaggggctgagacaccctccagggccaccaatggccagcgacttcaggagtggtcctgatttcctgcccctggggtcaggaggaaagcccagctttgctgctgctggatgggtcccttgacaacctcgagacctcccctaggcctcttataagaccccctactgccctatggatcctccacctctccctaagcattctcctcacccccacccaatggccagcttagactcacagaggtcaaacttttattgattcactggtgctaggaaaagcagccatataaccagacccaaagagcacactatgggattccatttacatcaagctcaaaaacaggcaacagtaacttaagctgttagaatttgcaacagtggttttccttggagagaaaaaggcagactgagaggggtagtgacttctagtggctggaaatattctgtttcttggtctgactgctagtcgcatgagtgtgttcactttgtaaaacttcctaaatttgctgaggtcggcacttaggatctgtgcacttttctagatgtatgttacactaaaatgaaaagtctctttagaaaaagtttttggccgggtgtggtggcttatgcctgtaattccagcattttgggaggccaaggcgggtggatggcttgagcccaggagtttgagaccagcctgggcaacatgacgaaatctcatctctacaaaaaatacaaaatacaaaaaaaattagctgggagtggtggcatgcacctatagtcccagctactaggggtgctgaagtgggagtatcagttgagcccaggagttggtggctgcactccagcctgggtgagagagcaagacgctgtctcaaaaaaaaaaaaaaagaaagaaagaaagaaagaaaagaaaaagttttaaaagaggaaaacagaaaagaactatgttaggattccagccactctctaaggtgacagaaactctttccagaccagggaggcagctcacggccagtcctctaagagcaaacacgcatgatatgaactagaaaataggatgcagaggcctaagaaggaacctgtatgagggctgagtagctgggagccccatctggagggaggaaaaagtgtcttcccttccctaccaaaataccaaggacggaaagggctcggggactatagatagcaaaccctttttttttccccttgagaccgggtcttgctctcttgtccaggctggagtgcagtggcacaatcatagctcactgcagcctcaaactcctacgttcaagcgatcctccagcctcagtctcccaagtagctaggactataggcacgcaccaccacgcctggctaatttttaaattttcttggggagacagtctttcgatgttgcccaggctggtctccaactcttggcctcaagcaatcctcccaccttggcctccttaagtgcaaggattacgagcaggagccactgcacccagcctgcagatagtaaattctataagtctgttgggagggtgggtggtaacctggatagggttgaatgggttaagatgggatgggataggatgagctgaaatgggttggagtgagatgggctgatctgaggtgggctgtgataggatgtgatgggataggacgtgatgggctgggatgggctgagataggatggggatttgaagatgggacccacattgtaaaggcctttacacgaagcccatcaagatgagagatgaggagtctggatttcattctgttcagagttggagatttcttagcagggaagtagagtccttagaattctcctggagggatcactctggcagaggtgtggacaatggagctcaggcgggaaagcatggaggccaggtgtttctcagatagaagcagtgaggccgagacaagaggccaagggcacccccaggactctgtgaagaactggaactggggagaacctggattcccacttcctaagtcagaaaactgaggcaggtcccagaagaggaagatgcttgcctgccaggctccagtacgaggctcgggtcagctctaaaggcaatgagctcctttttgtgtctcaggaggaacacgatgctatccagagacaggcttatgtcccaagagagaagtataaaatactcattgtggggccacaagaaccacattccagcagccagaaccaaggggctgagctgtggcaggccccgcgtgtgtgccatgcatcatgattctcagaatacttccagccagggatccgttttgagcctcgctagaactcacatcgatatctccattttacaggggtgaaaggcaggctaccaaaggtggctcacctggcccaaggtgacacagctggcaggtggcagagtcaggaggtgaacccagaagggctggccctaacgccccatcatcttgtgatctttctttttttttctttttttgagatggagtcttgcaatgtcacccaggctggagtgcagtggcatgatcttggctcactgcaacctccgcctcccaggttcaagcgattctcctgcctcagcctcccaagtagctgggattacaggcgccaccaccacgcccagctaatttttttgtatttttagtagagacagggtttcactatgttggccaggctggtctcaaactcctaacctcgtgatccgcatcttgtgatctttctagaaacacaacattgttccacggtctcaacctggttttttggtgggaaagaaacaggagctcttggccagaataacaaaacagagaacaaagcacgcactccccgctcacctgtgtgtgtgcggacgtgcctcttcaggtcgaaggtgtcgttgaagcccttgccgcagaaggtgcacaggtgtcttttcacctggttgtggcacttgaggtgacggttcagcatgcgctgcagacggaagcccttgccacacaggtcacagctgtgaaccaccgagtcgctgcacgtgcctgtggtgaactgggggcagagagaggccatgagggtccccgggcaggcaggcacatccagtaggctcactcaagagacccacctccctgtgtcttgaggctgccctgtctgcggcttctgcccctaaaattttcaagcaggttttggctttgggaaaggtgaagtaacaactggcagttcctcccacccttttttttttttttttttctttttgagatggagtcttactttttttgcccaggctggagtgcagtggctcgatctcagctcaccgtaacctccacctcttgggttcaggtaattctcctgcctcagcttcccaagtagctgggactacaggggcacatacaaccacgcctggctaatttttgtattttcagtagagacagggtttcaccatgttggccaggctggtctcaaactcctgacctcaagtgatccatccgcctcagcctcccaaagtgctgggattacaggcatgagccaccgcacccagccagttgctcccactttttattctccccttcttccttagaacaaacctctgacttctagctgggcatactgtcttacagcatcctacaggcatgtgatggggtatgaatgttaggcccctccaaatgtcttgttgaaatgtgatccccagtgttggaggtggggcctcgtgggaggttacaggggcagatccctcatgaatggcctggtgccgtccccgtagtaaagagcgagttcttactctcatcagttcatgggagagctggctgtttaaaagagcctggtggccaggcgcggcgtctcatgcctgtaatcccagcactttgggaggctgaggtgggtggatcacctgaggtcgggaatttgagatcagcctgaccaacgtggagaaatcccatctctactaaaaatacaaaattagccaggcgtggtggtgcatgcctgtaatcccagctactcgggaagcagaggcaggagaatcacttgaacccaggaggcaaaggttgcggtgagccaagatcgggctattgcatccagcctgggcaacaagagcaaaactccgtctcaaaaaaaaaaaaaaaaaaagagcccggcacttcctcccctctctcttgcttcctccctcaccatatgacacgcttgttccccttccgccttctatgagtggaagcttcctgagggcctcaccagaagaagacaccagccctatgcttcttgtatagcctgcagaaccatgagccataaacctcttctctataaattagccagtctcaggtattctttatggcaacgcaaaatggactaagacagcatggccatggactacctggccaatgaaatagaaatctccttgaaggggagcaaacggtgccttcttcctcctccactccttcctgctgactagagcaccaacagtcaccttggaccatgaggtgggaggagcagaaaggagtctgggtcctcatgacatcatggagcctggtatgttatattacagacagtacccaaagagagccacactcaattctgtcctccttgtgcctgcatcctgctccatttatcaagagatggagactgttttccctccccttgaatctgggcagggcttatgaccagttggatcaacagaatgcaatgaagatgtgtcagttccaggttttaagagaccttgtagcttccatttcttccctcttataagccagctgccacataagaagtctgaggctaccatgctgtgaggaagcccaagctagccatgtggacagccaaaggccacatgggggagcacggaggagccagatatgaataaagcctgattggactctccatcccaactcagggctgccaccagctgaatgagtcgcccccactaacactacccagagtagaactgcctagcagagccatgcctatggcttttgtcttgacccacgaaatcataaacgcataaaattatcattttgtaaagcggcttggtcagtacccacagctttgttatcagcaaaaccacaaccagacctgggtctggactccctgcccagtgctttctaccaccttcgctgctgctaaggaagaacatagaatctacatctgggtgataaaaatgatgtgttcaattttagtatctgatttggtaacttttgaacatgtgatgtgaatgttaccaaatcagatcctttagaagatggatcccattgctctgccaaaattcatcactagcaagaagactggtcctctcctggctccacactctcccagcttcaaatactctcctctttcatccaccctgggtattgccctcccaggactcaagggagctcagttgctcccttgccgatgcagccttctccaaatactgcagcccatgactaaactgctcactgtcccacttaaaccagtgcctctcagactccagcatacctatgcctcccctggggtcttgttaaaatgcaggttctgattcaggaggtctggtagggtctgatgtgctgcatttctaaccagagcccaggagatgccactgcagctgatgcacacgccacactagccctgagaagtcatgctatattccatctcattcccaagtttcactatgcacacagttcatcttgttttctcaactcaacactttgaggatggtcagcaagcattcggtcccattcctgcctccctacccactgctccaagcctagtctagggccagtgcacaatcagtatgtgctgaccggcagctgggagcaggtggcaggatgcagagagtctcaagggaggcacaagaccccagaacagggtattccagtcagcctcctccactagttcattttcctttgcttggagcttaatttgccccagctaacattgataagtccctgatctgtgacaagccctgtgcttagagctggaggcaatacagttagagatggcttaatccccagtccctaggaagctgccgagtctagtgggggtgcaggcaagtcaacagccattgacatctgagaggcccaggggtccgagggggcacctaccccagacctacagcaccagggaagatgcttccagaggaagtgagctccttagtcaggcaaagatgaggaagaaaaggggtgcacagcaaagaacattccaggagaggacaatgggaaagagggaactgtgtgtggttcagcatggctagcctgagcctgggagagcagttaatgaagagagcagtggtagctgagaagaacaagatccccttaggagtctaccttgagggccctactggagctggaatgtagtcaaagggcaagagggagccactggaagacaaagggggaacatcacaggggctgagttcgatgacccagttgggtggctgtcctggatcctcatcaactacctcactccccagaactgcagctgcccacctctacccaaggctttcctatcacccacgcagttcatgttctccttgcccggcagtccccatcctgcttacttccacccttgaagggatttgaaaagactaaatatgctccactaagtactttgagcttctaaagaccaagtgtgcacaagcacatttgagtggtagtgaggggctaatgaaatagaacaaagacaattaccctggtaattccagttaaaattagtaaaaacctgcaactgtcttttgaaagtcttgcagaatgtgcctaaggactcaccaaccatagttcaaacatgaattcttgtttaatctttttgacaaattcctatttttaaaatgctctgaatgcaatacagatgccttctattgcagtctagaatgaaaatctcaaatcgtcggtattattttgtttgaaaagaataagatcttgaagggcacagggaagggagatcagtgacaatttaagggagtacagggccagtagatcatctgatcaagacatagaaagtgtgttatttatttttgtttgtttttaattttttttagagatagaatctcactatgttgaccagactgatcttcaactcttatcctcaagggatcctcctgcctcagcctcccaaagtgctgggattacaggcgtgagccacaatgacttgccaggaagctttataaaacaggggagaaaatgggagtggagagaaggggttggagactgaaggcacacctaattctcaaggggacgtttcctctggttttcttagagcaaaaatggaaattctccacatatccctcagcaaaggcaatttttccatttctccccatttcacagcatggaaagctgagtcaccaagaagtggctcaggtagggaattcatcctgtggcacaccctccaatccattaagtgctgcttaccacccttatgaccaatccagccatcagatattaacaaattacactcaaagtcttcaggagccttgttgaaagaagatgtaaggttatttaatggcaaaaaatcatggctgacaaagctagcttctgccagactatttcacttctcagaaaggaagggatctttgtaaattcctaaacatgaaatttatccctaaaagtatatttaatatgccttgtgccttgaaatttggtttgtaatagcaaaggactggaaactaaatacatgtctatcaataggaacttgtgaaaaaacggtggcagaaccttacaattaatgcactggacaaaggtaagaggctagaagcagttcaagtgtcacctgccagccatgtgagtgagcccttgtggatgtccatcccagtcaaacccccagaagactccagcctcagccgccatctgactgcaaccacaaggcaagaactgccctgctaagcccagtcatcccacagaggtggatgatacaatactacatcatttcatctattaaatttggagattcttgtgaagcagaaataggttaactggaacagtaataaacgtatcattctctccagacgccagacctgccacatttctaagtgtctctcccaggactgcatggtacagaagacacatctgactcctggactgatgtctcatggggcagaggaccagctgaccccgcctggatcaggatcacagctctgctcactggagcacctttattttgtttacataggtttacacctaacactgtacctcctaaaagttaaaaaagagttaatcgatcttaccttgttcctctacaagtactagactaaacttaattacatcttagtcatgttagttacaaaacaatagtggaatagagagacaataaatctgaaggatcaaaaaaaaaaaaaacctagatctggctaggggtgtgatatggaatgtcatttaacatccctatgtcacaatttccccacatgtaaaacaataaaatggtattagatgatctcttcagcagtataagaagctaagagcagggtctgttttccagtttcctcaattccttcaattcctgttctaccacttagtttgtggcaagttacctaacttagttgtaggcaagttacctaacttctctaagccttcatttcatcacctgtaaaatgtgaataataatatttgcattggcaggcgtggtggctcacgcctgtaatcccagcacttcaggaggccgaggtgggtggatcacctgaggtcaggagttcgagaccagcctgaccaatatgatgaaaccccgtctctactaaaaatacaaaaattagccgcgcatggtggctactcataatcccagctactcgggaggctgaaacaagagaatcgtttgaacccgggaggcggaggttgcagtgagccgaaattgtgccgttgcactccagcctgggcaacaagactgtaactctgtctcaaaataaataaatataaataaatataataataatatctgtctcttagaaataaatgaaattggcagggcacagtggctcacacctgtaatcctagtactttgggaggccaaggccggtggatcatctgaggtcaggagttcgagaccagcctgaccaacatggtgaaaccccgcctctattaaaaatacaaaaattagccaggcatggtggtaggtgcctataatcccaactacttggaaggctgaggcaggagaatcacttgaacccgggaggcggaggttgcagtgagctgagattgcgccattgcactccagcccaggcgacagagtgagactccgtctcaaaaaaaaaaaaaaaaaaaaaaaagaaagaaatgaagaaattaaatcttaatttaattaacctggtgctttgtaagtcctattatagttagaccaactccaaaattctgtggtcctaaacaaaaggtaattggtcaaaatttcttgtttctcggccagatacggtggctcctgcctgtaatcccagcactttgggaggctgagggggcagatcacctgaggtcaggagttcgagaccagcctggccaacatggtgaaactccatctctactaaaaatacaaaaattagccagttgtggtggtgcacgcctatagtcccagctactcaggaggctgaggcacgagaatcacttgaacccgggaggcggagtttgcagcgagccaagatcatgccactgcattccagcctcagccatagagcaagactgtctcaaaagaagaaaaaaaaatttgtttcccaatttgcttttgaatttttctctctttgatggaagaaaaggggaactaaaaaaaacaaaacgaaactaaaaagggagccactagctcccagtccttcatctgcaactctgtaattcaaaaagctctgaaaaacagctgggtatagtggctcatgcctgtaatcccagcactttgagaggtgtaggcaggaggatcatttgaggtcaggagttcaagatcagcctggccaacatggtaaaaccctgactctactaaaatacaaaaattagctgggcatggtgatgcacacctgtaatcccagctactcaggaggctgaggtggggggcggcggttacagtaagccgagatagcaccactgcattccagcccgagtgacagagagagaccctgtctcaaaaaataaaataaaataaaacaaaacatatgacaaaaagctctgacaaccaacattctctcctatctcccgtgacagtgaaatctgacctgagctgatgtaaaaatatgtgcagactttatcccatttagtgtcaatattcacattttaatatggaaattattaatatatttaattataaggtactgctccaagcctgccaggggtggtttttacaccatgctaccttctggaaaagcttaatcgtctcacccttaatccaaaattaacactttgcaaaaggcttattaacgaggtggggaaactaccatacagggagggaaatgaccttggtcttgaaattaattcagggcacgaagacgaagagacaatgaacagctctccaaccccatggcctggcgcttttctgagcactgtcctgttttctgcaggatctcggctttcatttcaaaaaatgtgcaaaattctcctcaagttcttcttctagaaaacaggactcagcggcagaacaaaccaatcattgtctccgcactgctgaaaactgcaggaacatccagggagtcagggccttcggctggccctctgaccagcttcaaagccggctcagatcattcacctgtcaaacttctaaaggtgaaaacaacgacaaaaaaaagaacaacttttattttctgttgatgtttctagcagacaagttcatttagttaatggtctatgggaggatattctgagtccaaggctaccttctggtggccatttggaccagatttccaccgacacggtgcgatgcttgaatgctaaaagcatgctaagcatatttccccaattcgtttggcattcagattccccccccgatcctatgtaccatttccttagacttcacaactcccctacatggcagaatggagagccttctcaaatgcagagaagatgaagggaatatatatctttataaacctgaagaagaaactgaggcccaaagagatatgacttgcccacggccacatgacttgtagtggccaaccctgagaattttgaatgtggtccgtcatctgcaaaacttgtgcctacagttccctcaggacaggcccacaggtctgtggggcaggaggagggggcatgaaccccattgtttgtctcatatcatcatgagtccttaatgtcagactatcaacactaagggctaaagcatcaaagccacatattgactacggctgacatactggacagtacagttgtcccacaatgcaatggaacaatgctgaaaggttgaggatccttgggttgagttttgccactaacaactttgaggaactcaacaaaaacttgctgggcttaatttttctcaccctgaaagtaaggagatttggggccatacatgctttaaaggttcctgtagtcgatcctatggaaggactcagtatctatcccaactccttttggtgggccttcctgcaccgccgaagctagagaagtgaaaactacgcttccctgactcccttgccatgaggatttgggaagtaacttgggtttcaccagttacatgcactatcaggagatctgaattcagccccgagttaactgggcagaggcaggcaagaggcaattgttttacactttgccatggcagatgcagggacgggcagccatcgaggtggcagcttcctgattgggcagcagcttcagctcctaggtggcccagttctgctctgtggctctgagtcattcctgggagctcagcttggtccttctttagtccatttaatacctttctctgcttaaactagctatagtggattctgatgttcgtaactaagcctatgtagtcctttccaacaataaaaacctacttcacctatattcaagtttaacaccaggcaattaatacacattgttctcatattcctccttttcccccttttaattaatttaaccttcatcaagaatccattccaagcatttttccagtatcccttttcttcctgctttctgtgttttccttcaaatgctatcactcatgtctgggaactgttgacttcttcccctgcctaaattcttgttctgtgttcacttatgtccttctatgacccaggcactactgcactggttgctgggtaatacgagcccagtaggaagtgttccctggctctgatggatctagagtggaaaagagaagtcagttggccaaatgtgcagccaggaaaatgggcagcaggttacagtggagcagggggaggagtattcaagtctgtcttgggagacaaaaaaacaagaggaaaggagtcagggatggagcttatattcccttccaaatatcaaatgaattggtttttaaaaacggcttgaatccataattcacaacaaaatgaatgaaataacagattgagagccaggctcagcagcatgtgcctgtagtcctagcactttgggaggctgagataggaggatcgtttcagcccaggagtttgagaccagcctgggcaacatagtgaggccctgtctcaaaaggaaaaataaataaagagaaagaaaagaaagaactaattagccatcaatggagaattctggttaacaactgattatcttcatttacaaataaaggtaaataaagcgaatccagcattattctgcctttcataaatgaactgtgccactggaaaaccaagcagtagatgaggcaaagtgtatctctatagaaatacatcagttaataaacagaggacagaattagattattgctgttttagaacacctaataagccaaaatatttaggtcctgagcatcaacagctgctaacatcagaaaaagagagataaccaaatattcagtgcctctgatgaagacagatgccccacagtgtgacatattctagctgaaataaaatagagctgaccaagcagggagagttgcattatccaatagaactttttgtggtgacagaaaaattatattctgtactgtccagtacattagcctctggtcacacatggctactagcatttgaaatgtcgctagtaggactgaagaacttaactgttattttgagacagggtctcgctctgttgtccaggctggagtgcagtggtgcaatcttggctcactgcaatctccacctcctgggttcaagcgattctcctgcctcagcatcctgagtagcctgaattacaggtgcatgccaccaagccctactaattttttttgtatttttttttaatagagtcggggtttcaacatgttggccaggctggtcttgaactcctgacctcaggtgatccgcccgcctcggcctcccaaagtgctgggattacaggcatgagctatggcgcctggtctaattgttaattcttaattgactatggctgtgatagtcacatgtgatactggatgctgcagctgcagatccaactatccgtttagagaaaacctaggggactgagaaacattaggcacatggtgatgcgctcagcaaaatccagactgttggggactctacaaaacaaatcacccatttcttcaacaattaacttgatggagggaaaatgtatgaaattaaaagaggctcaaaagacatgccaatcaattacaatgtgtggacattatgtggacctgattaagcaaactggaggggaaaagtattaatttatgagacaattagtaatgtgaacacaattggtaatgtgggtgtgatcatgaattttggtctttatccactaaacgcacattctgaactatttatggttgaaatggtatgatgtcctagatttgcttcagaatcatgcatggggcaaggggtgggagtgtggctgggcaggactggccatgggttaatggttgttggggctgggtggcagatacgtatgactatgcctttgagattgtaaataatacaaagtgatgggggtatggggactactccgtagacacacatctgcaccactacaagactcgatagagagccgggtaaaaggccaagcatacttttgaaagaatctaaacttaatttattttgaagaacccatgggagaggacaaaaagaaagaacagaataggaaagggtgagaggacaaattcacttggtactccatacttggacctgggtcctaccagccagagaatcacgtatgaatactatcagccaacttcagagttacttactttctaataagcctccaaaggacaatggtgattagtatttcctgggtttctctaccccgcagctgaagacctgcagatggatccagcacaaaagggacctgccatgcacactctctggaatgtacatcatcttctcacccttatttgtttggcaaattacagaattctcagtagtaaagagacaatttcacaatctgccctgaggcacaccgtcaaaaggcaggtaggctgggaagggccagccacatttcctaatctgcacctcggactccttttccagatccacccatcaacacgatcaagttagtgaatcccatgtccttacagccaacaaaatgttgggcattaaaacttgctgtatgtcactgtcagctaacttcctcttgggcagtttacacatgcacagaaagctaaacactttacacccactatctcatttaatctatgcaactcttctaggaggctgattctttgagtcctccactttacagatcaaggaactgaggctcagaagagataatgatccatgaacacagccgttaagagggacccaaatggcagggcgcggtggctcacacctgtaatcccagcactttgggaggccaaggtgggcagatcacctgaggtcaggagttcaagaccagcctggacaacatggcgaaacttcgtctctattaaaaatacaaaaatcagccaggctttgtggtaggtgcctgtaatcccagctacttgggaggctgaggcaggagaatcacttgaacctgggaggcagagtttgcagtgagctgagattgcgcaactgtactccagctccaggcgacagagagagactctgtctcaaaaaaaaaaaaaaaaaagaggaacccgattgaggttttccttcttacatcatccagagcttctcctctgcccagcaggagcacccatatttcttggcttggccccttcaccatctcaccctgtcctggttacatttccagctctttaccgccaactctctccctgaccccagcaagccctgtttcctatcttcagccaccagagcttcatcctttctatgctccagctgcgggactcagcccacactgccctcaggcccacccgcctcccttctccccagccttcaaatccacatcaggacactttccccactcaaatcggtcacgtctttgtttggaattctggtttcacattcactgtcctgcagcagagttaataatgtttgtgtctccctattaacctgaatactatctatggttattgggcacataccatgttctaccctccactcatttatcctcacgatgctatcaagtaggtatcattatcatcttacagataaggaaaccgaggctcagaggggtgagccacttgctcaaggtccacagctaagaagtgacaaagccagagcttatatgattaaccgctactgccagatgattctggaaggaacaccagggtgggagcatttttacctcctgctgccttgcacaccccaggtgttagacgggcagagtgttgcttctctgtgccaggcaatagctcaaacctgcccttcttgtggtcctgggagcccactgcctaagaaactaattcttggctggatgcggtggctcacgcctgtaatcccagcactttgggaggctgaggcaggcggatcacctgaggtcgggagttcaagaccaggctgaccaacatggagaaaccctgtctctactaaaattacaaaattagccggcgatggtggcgtatgcctgtaatcccagctgctcggaaggctgaggcaggagaatcacttgaacccgggaggcagaggttgcagtgagctaagatccagccattgcactcagctaagatccagccattgcactccagcctgggcaacaacagcgaaactccatctcaaaaaaaaaaaaaaaagaaagaaaagaaaagaaaagaaaagaaactaattcttagagaaattgtgagttcagcatgccttggaaagaactttataattatacaacgtgctaagtcacaggcaatttggtcagtcatttgaaaactgccaatgccatggctgataataattctggaggcttggagcatattaacaccaaaatgtttcctttttgggggtagaggcagaaagagggaacctaaacatccccagtaaataaaaattcccctggaaactatggaaagaagactcttaacggttcaggagtgaactgtgcctcccgccccccttcccccagcacacaggcaactaatctaggaaataagattggtttacgtcttcctttaatccaggattccaacggccctgtgtgcctgaggcagaagagtttgcctaaaatatttgttaagagactggatgagaatctgtcactttctctccaggggaatctgggcaattgggggacagaggggcaaactagctgcagaggctcccaaaacaacgttgcaattgtccttccagcctggtgataaatatgcaagtggggcactttgtagaatctcccgaagggcagagctaccagcctcaggcaaatttttccctcccacttaaccccacctggcccggaagagcctcaggccagctgactttgaacctcaccctcacacttaccgctaagctgccggcccgcacggtttcggcagcttcttctttaaagaggtctttcctttggatcccagctgaagcctcaaacctcagttcaaaaccaaatgcgcctcagcccaccccggagtcaaaccctgggaatacgcaatgtgcataggggacctctcccaggaaaatgaggggtcctttctcaatccacagcaaagcccaggctctccctccccaccgccctctactcccggtctgggtggcaggagggcaccggagagccctggaattaccacctgcaccgggggtctagggggtgcacagtgtagcactgcggcccaccaggctagaaagaggggccaagtgatcataaaccaccacctcctagctccagctggctgagtcagtggaatgggattcctaaaccttggtgggtagcggatacctttgagcagaccatcatggaagttctgcccgaaagcgcaggtgggcgtccagaatgttcgagggggccccgaggcgcgaccatagatgggaggaaacactccaatccactggggtaggggcgctcgagaaatctgtagttgaacccttttacccatcaatttaattcaagattggaaagatgacagatctaaagtgccgtgcacaagcctcctgtctgacagacactgggaaccggttcatgttgggagaggcccactatgtgtcaagctgccgcccaggtccagaacataagcatggggggtgaactctcagaatcgcggcgccaggaactgcgtcccagagggtggaatttctgagagcgctgaggcttcctttccaacctcaggaactccgacggccttggttattctacaggcctagcgcacagaacgggctgctggcggaaggcagtgatgcctgtgccttttcggcagttccagaggcagcactcggcatcaggcggggccaccgggaggacggagcccactccgggaaccggccgcccctgcgcagcagctaccctgcgggcgggaggacgcgccgaggcgccctggccgccgcccaggggcaggtgcaggagcggcgcggcgggcgcgctcggggcgcgggtgccgggttgcgcaggcgggcgcggcagggaggggcgccggcctcgggagcccgacgccagggcgtggtgcaggtggcggcgggggcagagtcgacacagtaccttgattttcgatctggcgaccgggcgctgcttggtcgccaggtgtccatcggggccctcggcgtcgccgggctcgggggtttcgctctcgggggcgtgcggggacgagctgctctctgctcctccaggctcccccgcgctgctgctgccgctgccgctgctgctgccgccgtcgctgcggcagtcctcgggggggtcgtggagcaggcggcctaggcccactgtggagggaggggccgcgccccgacacacacactcggcgtcaacccgcacgcccgcggcagtttgacctgcgggcggtgctgccgccgccccgccccggacctgggcacctcgccaagtgggcaacgtcgcgggggaggccagtaagccccgaatcggcccacagagctagcttggggtgctcggagcctctttccggtcccagccaaggcgcccacgaggaaccgggcggccacgagcggcggaggaccccgcgcgccaagtttcctctcagggcgggggaggcggatctgacctctccccagctagccccagaagggttggcgagcctttgtgcacccccatgaggacgtgagattgggggtagcctctgctggctttcaatccctttcctgggccaccttggcccgcgctgcagccaacggtcccgccgccgggcaattagaggctcccactacggggaagggggcgcctagagtctggggcatcccagtccctcattgcctgccctaacccgcctagaagacccccgcgtgccccccggaagagggggatgaggtggggagcccgcccctgccgatgagcagagaagacccgccaccccttcccccaccccgggagcccagcgcccaggcccggcccccgcgcgcgctcacctgggatgtaggtgtctgcccttttctcatccgggagctcatcccagctgcggaccgagacccccaggctcctcctcttcaccaggaagactttgggcatggtggggtcccctctcccgactgcggccccctcctcccggctgctccccgctaggggcaacggcggcggctccgtccccggctcccggcggccagagcccaccttcccgcctcgcctgccctcttcctccaccccccgccgcggcgcggcccaggcctctcccccgcacgcctggcgactcccagcctcccggctcggcgacacctatgccttaaatcgcgagtgagaccacgccggggaaaaagtttcataaggtggaatagaaaaggcaccaggaaacttgggactgagcatgcgccctgcaacataacggtgtcaacaagctcgctacctgtccgaccggttccggcggccggggctgcctgttccagcccttccttaggcatgaatgtttgcaaaagaatttaaagtctgttcttccccctcctctttttaagaaaggaagaacattttttaatcaacccccgccccattcccccatcacctgcacctcgaggcgagctcttcgaggtaaaccccaggttcgcctcccagggcacccctccggtgagttggggcctcccacgagttgcccccctcccccgcccggtggatttgtcttcgacgagccagaaaatggctcagttcccctggaccttgtggagccttcctggggcttgatgaaatctgggcggtcagaagggggaggcggcgggagacttccaaggattctgattattaataatggggggtgggggcttaggggcttaagctttccatcagctacaacaccccccccccataagcagtaaaaataaatttaaaaattcggcatctttagaccacgttatttttctgactagtatcatacaatctaagaaaaacaagccttgccccgccaaagcagcttctcctcacaagacgttgcaccccccgagagccccctcaccccaagtaaacacacaatagaaacaaaagccaggagcatattatgcaaatgcagcttcaaaacaagcccccaatcctcgcccactcccaccgttgcctctcctaaccacccgatccccaaattctgagactgggaaatacctttccaggaagctagcatagtgaacattggctacatcttctagccgcccctaccggggaggtaggaaagctttgcatttattattatatctgtttgttcctatcaacctttatgcctggaggggagagggagagaaggagggggagttggtaaaatatgccaagtttgtaaagcagttgtgctcacgttgcggggcgcgctgcccttcccaaggccttgttcgggtgcgcccaggacaaccggcacagcctcttgtgtcgctgcggtcgccctcctccaggaggtcgtcagacgtgtgccagctgccgggtgctgcgggggcgcgtctggtcagggatgccctggagcccaaggctcacccaacagccagcctcacctgtctgtaacctgaccctccgcgctcccagcctacagggcccgggaatcaacacagcggttttccctgttcccttccgccctgaatggcccttggggacacaaccgcctggtaacggatttctcggcgctactggcggactcgcgcggcgcagggagccggggcgcagctctgccggggctgcgggcgggaccggtgcgcggcgcctctaggtctgccctcaaggagtcaccctctctggactgaactctgaactccagcttttctctaagaaaaaccagctaagaacgaaaaagactttgatcccggtgagccggaggaggaggaggaggaggaggaggaggaggaggaagacatttctgtagcggtgcaggaaaacaaggcttcttgtctatgaggctgatggggcagcttccgggagactctgcagatgtatttttatccaccaacaaacgggatttgctagaaagaaggagcttgggtgaatggaagagtaaaaatgaagtacaactatgaagttacagaattattcccagtctttaaaaatcttcaaaacttcacttcgttcagaacttccaattatacagaagaggctgtcaactccattaacaaagcttttttttcctttcactggatttcaaaccagtgagtgtcttgactactttgcctatttgtattattttaaaagattataggatgatgaggtataaggctagaaacctccaaagcaatgcaacctttataggtttggggatgaagacttaacaggataacaacctttttattctatggtcgttggatgcacacctactatatttgctgggtgcttcctgaggagaaaggaatttaatgtgttttatttctctcttttttcttgatcagatgtgataggggtctatcaaaattattaacatgtacaaagaaccagcttttatcttggttgacttgcctccattgtaaggtcggttttctaagtattatgagaggagttgatagagtatcccagaaagcaggataagaagtgaacccaattctccttttcttgcactactattatatgcttatacactgttggtgagaatgcaaattaattcagcccctgtggaaagcagtttggagatttctcaaagaactaagaatagaattaccactggacccaccaatccaattactggatatacaaccaaaggaaaacaaatcgctttaccaataaacacttgtgtgtttattgcagcactattcacagtaggaaagacatagtatcaacccaggtgcccatcgatggtggactcaataaagaaaatatggtacatatacaccatggaatactatgctgccacaaaaaagaatgaaatcacatatttgcagcaacatggatgcaactggaggccattatctgggcaaattaactcagaaacagaaaatctaatactgtaggttctcaattagaagtgggagctaaacattgggtacacacagattcaaagatgggaacagttaacacaggggatttcaaaagtggggagggagagagggggaaagccttgagaaactacctatcaggtactatgttcactatttgtttttattttcattttatttttgagacagagtttccctctgtccccaggctggagtgcaatggtgagatctcagctcactgcaacatctgcctcctgggctcaagcaattcccgtgcctcagtctcccaagtagccaggactatgggcatgcaccaccacacctggctaatttttgtatttttggtagagacagggtttcaccatgttagccaggctggcctcgaactcccgagctcaagtgatccgcccccctcgccctcccaaagtgttgggattatagacatgagccaccacaaccggcctgtgttcactatttgggagataggatcattggaagcccacacttcagcatcatgcaatttacccatgtaacaaacctgcacatgtacccccgaatctaaaattaaaaaagaaaagaaaaagtaaataatgctttaaagctttttcacattatttcctaaatacctttatttacattcatttggcaatattatttgtcccattttttaagaaggagggaaaataggctatgagaaactaagtaccattcaagttctgctgggcgctgtggctcacgtctgtaatcctggcactttgggaggccaaggcaggcagatcacctgaggtcaggagttccagaccagcctggccaacatggtgaaaccccatctctactaaaaatacaaaaatttgctgggcatggtggtgcacacctgtaatcccagctactcgggaggctgaggcagaagaatcacttatacctaggaagtggaggttgcagtgagccaagattgccccactacaccccagcctgggtgacggagcaagactctgtctaaaaaaagtctcgctgtgttgcccaggctggagtgcaatggcgagatctcagctcactgcaacctctgcctcctggattcaagtgattctcctgcctcagcctcctgagtagatgggattacaggcgcctgacaccacacctggctaatttttgtatttttagtagagatggggtttcaccatgttggccaggctggtctcgaactcctaccttatgatccacccgcctcagcgtcccgaagtgctgggattacaggtgtgagtcactgttcccagcccaattattcttcatatgcacatcctcatatctcatttgcaacaaagtcagtttaacttatttattaaataacaaacgatctgcataagttaaaaatatataaaagtagacatttatatctgagcctcttattacattaagtacaaaatatacttttgattgtcttgtcaaactgtagagatgtgttgctgagatagtgcaggtacgtttggtagagttgagtgaattctgggtgtagctactggccttgaaatagattcatttccattccttccacctgggatcgtggcctctgccttatttggacggagccctcagtatgaaagcaatttatctggctcatattacacaatgtgttaaataccttgttacctctttaaatatagacattttggtcatagtcaaagttgaatactcagaacttaaaaacacacacaagatgttaataaaaacaatttcaattttaaaaaaagaagaaatgaatccaattctttacaaatctcaagactgaagttggaagagacaggagacataatgtggtccataccccgcccaatattgggggtgaggggtctgtacagcatccttggtaggtatgtatctagccctgcttgaatacttctagtgttgggaagctcactgtctcaaaaagcaacctattctctggttagacaacaatgatgctagaaagcttttctttctgcttgtggaaatctgctttcctgcccttccatctccccttttattctgtcatccagggctgctgagactccccctgtactccctccccctggtagctcttcaaattcttgaaagcagccatctgcaccctcacttaagacttcttttctccagtaatatatattcaggttgaaaggaggcaggtacaaacctgctcagtggcatccctggagcacacagcaataaggagagggtaagatgttgttgagaaaatattcctaaggaaactttatttaaactttttttttttttagacagagtttcgctcttgttccccaggctggagtacaatggcacgatctcggctcactgcaacctccgccacccaatttcaagcgattctcctgcctcagcctcccgagtagctggaattacaggcatgcaccaccatgcccggctaattttttgtatttttagtaaagacggggtttctccatgttggtcaggctgatcttgaactccctaccttagatgatccgcccacctcggcctcccaaagtgctgggattacaagcgtgagccaccgcgcctcccacctaaacttttaattgaagtatagtacagtattaggaaaatgatatatttttacccactgaactcactagtggaaaaagcacccaagtacaagccaagggtgcctgctctcaccaccccactcacattagattgcttccttgcaggtacagcaaggcaaaaaagaagaaataagagtataaggattataagggaaaacaacaaaactactattgtttgtagtcagcatcactgtctacggaaaacccaaaagaatctatagataaattattagaattaataagagactttagcaagattgcagtgtagaaaatctgagtgtgggctgggcacagtggctcatgcctgtaattccagcactttgggaggccaaggtgggcaatcacaaggtcaagagattgagaccatccaggccaacacggtgaaaccccgtctctactaaaaaatacaaaaattagctgggcatggtggcgcatgcctgtagtcccagctactcgggaggctgaggcaggagaatcactcgaacccaggaggtggaggttgcagtgagccgagatcgcaccactgcactccagtctggcgatagagcgagactcggtctcagaaaaaaaaaaagaatctgagtgtgtaaggtttcagtgtcaattaaatttctacatgccagcaactgtcagaaaaataaaaagtctaatgaaaaatgatttaaaacacaacaaaaatacaaagtcccttgcaattgattttttgaaaatattgtgcaagctctttgtatataaaattagaaaactttattggtagccgggcatggcggtgtgcacctgtagtcccagagactcgggaggctgaggtgggaggatcacctgagcccgggacgtggcggttgcagtgatcctatatggcaccactgcactccagcctgggccacaaaaaagaagaccctgtctaaaaaacaaacaaacaacaacaacaaaaaactttattggaagacattaaagaagacactaatcaatggaaagttttactatattaatggattggaagattcagaatcaaagaggccaaaaatctccaaattcatctatagatataatacaatttttaaaaatacttgacagtctttttgtgggacatgataaatttctttcaaaatttatgtgaaagaagagtcgaaacactcctgaaggacaaggtgtgtaggcttgatcaatcagatatcaatagtaattaaaatgatgtggctttcattcacagagggaccactggtacctgagagagagcctggaaacagccccacacatatgtgtgcattgatttatgagagagggtatgcagtgcagcagggaaagatgtcatattcaatacatggaattggaacaagtgcttatccgtttgggaaaaataaaggaaactgaataacacacatatcagtttctggtggattaaacatttagatgtgtgtgaatacatatacatgtatatgtatatagacaatgtagaggaatatgtttatgaccacaggataagaaagaatttcttaaataagacccaaaaaataaaccacaaaagaaaaagggtttccaccttgaagaactgtgaacttaaaaaagaaaagaaaaaggttgaggctgggcacggtggctcatgcctgtaatcccagcactttgggaggccaaggcgggcagatcatgaggtcaggagatcgagaccatcctggccaacatggtgaaacccccgtctctactaaaaatacaaaaagttagctgggtgtggtggcacgcgccagtagtcccagctactcagaaggctgaggcaagagaattgcttgaacccaggaggcggaggctgcagtgagccgagataatgtcactgcaccccagcctaggcgacagagctatactctgtctcaaaagaaaagaaaagaaaaagttgataaatttaattgtagacaaattaagaatgtctttatcaaaacacacaataaggagaatgatatgctaaacaataagctgagaaaactttttcaacacatttctcttacaaatgattagaatccagaatatgtaaagaactgttatgaatcaatttttaaaaaaaagataaactcaatagaaaaatgacaaaagacatgaacgggcattcccaggaaaacatgaatatataaacatatatataaaagatgcacgatctcattcataaacaataaaatgcaaattaaaatgacaatgaaatactgttttatatcagactgacaaaatctagaagtctgaaaataccaagtattggtgagggcaccaagcaataggtttgactttatttagtaaaattgagccagaaattccagtccacatttttaatctagaaaaagtcatccattagtgaaccaagagacacaggcaagaatattcataatatcatcattcataatattccaaaaaataaaaactcaacctaaaaataaaagacacaacccaaatatctgtcaataactaattggatgaatactttgtgataaattaatgcaagaaaaataaatggccccacagccacacacatcaataaagccacacaatcaaaaatatagttgaatgaaaaaagtaaattacaaaaaaattataatattcaaattattttttaaacacataaaagtgaacaataggctatttaggaatacaaacatatgtgttaaaaccattaagcaacaggccaagtgcggtggctcaggcctctaataccagcacgttgggaggccaaggcgggcagatcccttgaggtcaggagttcaagaccagcctggccaacatggtgaaacccgatttctacaaaaatacaaaaattagccaggcatgatggcacacacctgtaatcccagctactcgggaggctcaggcaagagaattgcttgaacccgggaggcagaggttgcagtgaaccaagatcccaccactgcactccagcctgtgcaacagagcaagactccatctcaaaaaaaaaaaaagcaaaactacaacaacaataaagcattaggcaacaatcgacaattatggaagaatatcaaaagaattatgctgaatgaaaaaagccaatctcaaagtttacgtattttatgattccatttatataacattcttgaaatgacaaaattacaaaaatggagaaaagattagtggttgctaggagttaaggatttgtaaaaggaagacaaaaaatatccttgtggcattggaactgtgcagtatcttgactgtggtggttgatgtacaagcctacatttgtcgtgaaattgtatagccctaaatacacacacacacgcacacacacacacaaatgagtacaggtaaaacggggtaaatctgaataaaagctgtggattgcttcaatgtcaatatcctgcttgtgatatcatactttagttctgtaagatttacggttggaggagacaggaaaaggtcacacaactgcctatgaatttgtagtatctcaaaattaataatttaaattatcattagttacagtaagaaaatgactaataacaaaagtcaggatagtagcgaccaccagggggagaggaaagggtatacacaaggagtgtcccaacgcaaagaaaagataaatgtttgaggtgatgaatttcccaattatcctaatttgatcatcacacattgtatacatctatcaaaatatcacaggtatcctcaaaatatgtacgactatcatatgtcaataaaaaaattcaacaaaattgccaggtgtggtgactcacgcttgtaatcccagcactttgggaggtcaaggcgggtggattacttgaggccaggagttcaccaatgtggtgaaagactgtctctactaaaaaaaattaaaaataaattcaacaaagctcactgactcgttgagacgactctggccgtgttgactgctgacgctgtgctccagccttctcagttagggggcctaagatctctttggtacctgggttgtctggtaagagccagacttggcagcaatcctctttctaggctgaaccttgagtcccattgctttttgatagatctaatggattactgctctgcagccagttcttcatgtgttacccgttaggccagttctgggggaggcatcctcgtctttctttgccatagaacaaacactagtcagtcttgcaaagcctttctttcactttcaagtgagattaagttaattccgatttggttaaaaacttcctaaaggagataatttagtctactggtttgatacaggtaaatggactttaaactttctttaaagtaaagaagttggtaggtacagttagattatagtcttgaggtccgtgtgaaaccagcgtcaccatattttgatttctttgatcagttcagggcctgaaaactctgtggtgggggaggcgaaagaatccaaacttttccgtatgaaagcatttttcaccaaaatgagcctcatccctttacgcaaaacacacacactaaaggaaatagggaaacagtctttttattttatttatttattttttgagatggagtctcattctgttgcccaggctggagtgtgcagtggtgccatcttgactcactgcaacctctgtctcccggattcaagcgattctcctgcttctgcctcccaagtagctgggactataggtacacaccaccacgcccagctaatttttgtatttttagtagagatggagtttcaccatattggccaggctggtctcaaactcctgagttcaagtgatctgcccgcctcagtctcccagaatgttgggattacaggcgtgagccaccatgcctggctgaaagtgccttttcatttctccttaccatgtataagttcagtcattgtcttgaacactgtctcaaatacttgttttttgttgtggatagaatcttctctgaataagaagctgaactttccatagagaggccctggagtctaaaattatcagaaccattaatttatttgtgtcttctattatgatctcttgttttgacaataagaacccttattactttctcaaaaaaaaaaaaaaaatcaacaaaaatcccaaagaaagacaaagacaggctgggttttcaagaaagttcaacaaaaatcccaaggacagacaaagagaggctgtggtttcaggctagtaatgttggatttctaaaccaggaaagtaagaacaattattattattattattattattttgagatggagttttgctcttgttgcccaggctggagtgtaatggtgtgatctcagctcactgcaacctctgtctcccacgttcaagcgattctcctatctcagcttcccaagtagctgggattacaggctaagtttttgtatttttagtagagacgggggtttcaccaggttggtcaggctggtctcaaactcctgacctcaggtgatccatccacctcagcctcccaaagtgctgggattactggcatgagccactgtgcccagccagaataattattattatttcactgtgtatatatataatatacactcttgtctgtaaaatatattttacgacaatttttattgaggtataattgacaaaaattgtatatattcaaggtataggtgatgttttgctatacatatacattgtgaaatgattactttagtcaagctaattaacatattcatcacctcacagaggtacatgtgtatgtatatatgtgtgtggtgagaatacttaagatctcatccattagcaaatttcaagtatacaatacagtattatttactatagtcactatgctgtacattagatctctagagcttattcatctaattactgaaagtttgtaacctttggccaacatcaccccttttcccctaccccatcccccggtaaccacccttctactttctccttctatgaatttgactttttaagattccacatgtaagtgagattatgcaatatctgtacttcttgtcctccaggttcatccatgttgtagaaaatggcagaatttccttcttttttaaggctgaataacatcccattatatatgcatattttatatatattttacatttatatattatatattaacaagccacaaaagaaaggtatatatccaaaggaattatacattatatataataaataaaatatagccaagagtggtggctcatgcctgtaatcccagctactcgggaggctgaggcaggagaatggcttgaacctgggaggcagaggttgcagtaagtggagatcactccattgcactccaggctgggagatagagtgagactccatctcaaaaaaaattaattaattaaaaatatatatatatacactatataatatatacacatgttctttatccattcatctgtggatgaacacttcagtcgtttccatatcttggctactgtgaataatgttgcagtgaacacaggagtggggatatctctttgagatactgatttcatttcctttggatatatatccagaagtaagattgctggatcatatggtagttctatttttatttttttgagaaacctccctactattttccacagtggctgtaccaatttacattcccaccaacaatttctgagggttcccttttctccacatccttgccaacacttgttattttttgcctttttgataatagtcaccctaacagttgtgaggtgatatctcatggtggttttgatttgcattacactgctgattagtgatattgactacattttcatgtacctgtcaagccagtttgtatgtcttctttggaaaaatgtctattcatgtcctttgcccatttttaaattgggttatttggggttttttttgttattgagttgcatgacttccttatttatttggggtatactcttactgaatatatgatttgcaaacattttctcctattccatgggttgctttctccttttgttgattgtcacaataattttttttttcttttttttttgagacaaggtctcactctgttgcccaggctggagtgcaatggcatgatcttgcctcactgcaacttccacctcccgggttcaagagatgctcctgcctcaggctcccaagtagctgggattacaggcacccgccaccacaccgggttaatttttgtatttttagtagagacagggtttcactattttggccaggctggtctcgaactcctgacctcaggtgatccacccagctcagcctcccaaagtgctgggattataggcgtgagccactgcgcccggccgtcacaataatttttaaaagagaaaacctaatcagttagaatagtgggcatgtgtcatgcttataggaacctgctgcacacctttatgcttgggcaatttcccacttatgagttaacttcctcacaacagagtctgcaaattactttcccagactccatgctactgagtgcaagcgtgtgacccaagttctatggctgggattttcccatagactccagttaaaaacaaacaacataaacaacatgaaccaagacgagctgccagtgtctgctggggcaagggtgacggagagagacctccgaagcttggagggtgctgtggccaggttcctggtggtcgagccctgtactcagcgagaatggtagttagttactcaggcatcctggacagagatggctgaaacagacaccctcgcaggagtggcctgcactttaatttgagcatcgattcaggacgcttccttgcaagatggagtctccatctcccgagattccatgagctacctagcagtgtttaacacactccttttctgattcagctggctacagtgagttctgctgccacatcctgggtcatcgattctgccattggtgtcctaggacagcattaagaccttcagctgtcttctgattgaggacaagatcatggtgtctcatcgtccccaccccactgtaattcaaaataaaaacaatgctaaaccacaaaataggtacttgtcttttttttttttttagatggagtctcactcttgtcacccagcctggagtgcaatggtgcgatctcagctcactgcaacctccacctcctgagttcaagcaattctcctgcttcagtctcccctattacaggcgtgtgccaccacgcctggctaatttttgtatttttagtagagacagagtttcaccatgttggccaggctggtctcgaactcctgaccttaggtgatctgcccgcctcagcctcccaaagtgctgggattacagatgtgagccaccgcgcccagcctatgcttatcttaaatctccactttctaggctattttgcaaggttctggttagactcgtcaaagcagaatctctctctttgtctctctctctttctcagcccctctcctttgtcctcctgcttttctggtgtcctaaatttattcctaatctgcctctagtcttgcactgtccaaataggaactgcagttggttacatgtggctactggctattgagcacttgacaggtgggtagtctgaaatgagatgtgctataagggtaaaatacacaccagattccaagtatttaatatgaaaaaaataatgtaaaacattaactgtttgtatattcatttacatgttgaaatgatagtgttttggatatatcagggtaaataaaatatattattaaaatcaatgttttaaacttttatttattttaaattttttttttttttttttttttttttgagacggagtctcgctctgtcgcccaggccggactgcggactgcagtggcgcaatctctgctcactgcaagctccgcttcccgggttcacgccattctcctgcctcagcctccccagtagctgggactacaggcgcccgccaccgcgcccggctaattttttgtatttttagtagagacggggtttcaccttgttagccaggatggtctcgatctcctgacctcatgatccacccgcctcggcctcccaaagtgctgggattacaggcgtgagccaccgcgcctggcctattttaaatttttttaagagatgggaatctcactatgttgcccaggttggagtccagtggctattcacaggcacaatcacagctcactgcagcctcgagctcctaggctcaagggatcctcttgtttcagcctctctagtagctgggactacagggccatgccaccatgtgtggctctttaaaaaactttttatgtggatactaggagatttcatattacacctgtggttcacatagtccctccctccctccctccctccctcccttccttccttcctccctccctcccctcctccctccttccctccctccctccctcccttccttccttcctccctccctcccctcctccctccctcccttccttccttcttttcttttcttttctcttcccttcctccctccctccctccctcccttccttccttccctccttcttcctttcttttgagatggagtctcatgctgtcacccaggctggagtgcagtggtgcaatctcagctcactgcaacctctgcttcctgggttccagtgattctcctgcctcagcctcccagttagctgggattacaggcgccctccaccaaggctaattttttgtatttttagtagagacagggtttcaccatgtcagccaggctgctctcaaactcctaacctcgtcatccgcccgccttggtctccggaagtgctgaggttacaggtgtgagccactgcgcctggctgttcacattgtatttctactggacagtggttctagactatttagactgacatgaagagcctgtattgttctggaaggctcacttcaggtattcctccaatgttcctgatcagcattcgattgagtgggggatgagaaggagattgcattgaaaggccagtgatttggctttgaaacctggctctgctactgataagctctagggatatagtggctcagtcagtctgaaagcctcaaaagcagggaaactgacagtgcagccttcagtctatggccaaaggcccgagagcccctggcaaatcactggtgcgtgcccaagagttcaaaggcggaggaacctggagtctgatgtccaagggcaggaggagtggaagggaggatccagcacgggaggaagatgaaagccagaagcctcagcaagccagctcatcccaccttcctccacctgctttgttttatccctgctggcagcccattagatggtgcccacccatgctgagggtgagttcttcctctcccagtcagctgactcaatgtcagtctcctctggcaacatcctcacagacacacccagaaacagtactttaccagccatctaggcatccttcaatccagtcaagccaacacctgatatcaactatcacactaggaaaatcaaatgggatcatatttgtgtatgtgcttgtatgaagaattatgctactgttcagataacaaggctgggcacagtggctcacgcctgtaatcccaacactttgggaggccaaggcagttggatcatttgaggtcaggagttcaagaccagcttggccaacatggtgagacccagtctctactaaaaatacaaaaattagccaggtgtggtggtgtggtggcacacgcctgtaatcccatctactcggggggctgaggtaggagaatcacttgaacccaggaggtgaaggttgcagtgagctgagactgcaccattgcaacaagcctccatctccaaaaaaaaaaaaaaaagacaatgaccaatgttaattaagtgcgcctgtgacctagctactaggtaatatgctctgggcatattgttcctgaagcagcccttgtgggagagaaatactcttttcatgcccatttcacaagtgagaaaaccaaggcttagaaaggtcaagagcccctacttttaagcccctcattagagatatacaaattttatttatttatttatttattttgagacagagtctcactctgccacccaggctgtagtgcaatggcatgatctcggctcaccgcaacctctgcctcccgggttcaagtgattctcccacctcagcctccccagtagctgggattacagattcgggccactatgcctggctaacttttgtatttttagtagagatggggtttcaccgtgttggccaggctggtcttgaactcctgagctcaagtgatcctccctcctcagcttcccaaagtgctgggattacacacatgagccaccacgcccagccaatacacaggattctaagaatgtgcattctgagtttagcaggaactggcagcatgtccatcagggcccccagtcatgccaggtgggggacccccttgcctgaggctcctcagtctgtaaacacacttggaattttccaagaacaagatatcagtgtcttctccacaccaacgagctctgcatgctctgggcacaattgtttctggggaagggtgggaaaggaagggtctaccagcttgaagtttacctgaggaagatatctggtgttttcccatccctccagcattcatccttcatcttccagtaactgaactctcattttcttgggaaattgcttcttccctattctcatgctgttctggacaggccagttccacccctcctagcagaggtgggaatttaacccagctaattagaaccctccaccatcttggccatggcgactgtttcaaggacagatgtgacatccagacagagccagctctgtaggtgagctgctgtggagactcccatccctccaaggttgaggagaggatgttatataagcttagggttggcagccatctctgccaccagcagctgcctgcagatgacgccaacagaggaaagtggagagtgtgaggctgggtccataagactgtgttggatcctgttatttctctgctctcctagtgactcatggaaaacacagtgtgtcctttcccaacaaaccacaagttggttctccaaaggccaccaggccacaataatgttttagctcaccctcgtgaggcagagggtatggttctgtagattgaagatatacatgtaaaacaacagatcgccatcatttggggcaccataaaaatataaatgtaaatagatggcttgggagtgagttgattgtcattataagaattattggccgggcgtggtggctcaggcttgtaatcccagcactttgggaggctgaggcgggtggatcacctgaggtcaggagttcaagactagccaggccaacatggtgaaaaccccatctctactaaaaatacaaaaattagccgggcatggtggcgcatgcctgtaatcctagctacttgggaggctgaggtgggagaattgcttgaacctgggaggcggaggttgcagtgagccaagatcgctccattgcactccagcctgggcaacagagcaagactccatctcaaacaaagaaaaaaaaaaaaaaagaattattagccgggcgcagtggctcacacctgtaatcctagcactttgggagactgaggcgggtggatcacaaagtcaggagttcaagatcatcctggccaacatggtgaaaccctgtctctactaaaaatacaaaaattagctgggcgtcatggcatatacctctaatctcagctactcgggaggctgaggcaggagaatcacctgaacccaggaggcggaggttgtggtgagccgagattgcgccactgcactccagcctgggagacacagggagactccatctcaaaaaaaaaaaaaagaagaaaagaattatttaagatgtagggctccaggtggacaaactcaagtgtgtggataatgtcacatgattttgttttcttcactttgactccaaggctctatcccgttgtggtgggcttgccatgcagccaccttcttccctctccactttggattctgttcccaaggaggggaatgggggtcctcactgctctctggatcccaagcctctgtcctcctccctagcttgagcaacctccttctgtccttccatggtcctgtgtccacacacctctcttccccactcatgaatttagcttgctttgaagactgcaagagaagcgccttcaaaagaccctgctctctccacacagacccccaaagacaagaaagcatgaagaacagctacctgattggtgccgatggaggaaaacttactactagaacaaaacacaaattaatatttcaatagttttcctgccacaaggtttcctcaacaattaactcatctttactgcctttcaaccatgtgtatggctatatgtctgtttgaggagtatttactagtctatggtaaatgttaacatggaacccccaaatgagaaaattattctctctttaattctctgttgatagttctgattcgattcaggggaaagtcttagtttgatgtgaatacggttgttttttgtgatttatttatttatttatttatttattgagacagggccttgctctgtcacccaggctgaaaggcagtggcatgagcacggctcactacagtctcaagcttctgggctcaagtgaccctcctgcctcagcctcccaagtagctgggaccacaggtgcatgccaccacgcctggctaatttttgtatttttagtagagacagggtttcaccatgttgcccaggctggtcttgaactcctgagctcaagcaatccatccacccctacctcctgaaatgttgggattacaggcataagtcattgcgcccagctgtgaataggtctttaacaccttcctaacactggctaaactccctttaaagagcaatccaatctcggactttgatcctctggcaagtaagcaatgagtaactggctaaaatttaataacattattttgttggtctatatctatgcattttcagcttcccctctattcatggcaagtgattttggcttcctatctccagtagcgatatagaattcctccttaaatacatttatttaatgaaaagttaagtgtaaatagattgtctaagaagcagatgccaagaagggattaaacatgcaagaaatgtactagggggaatgtctgtgagagaaatgaggagggagccagaagaaggttttgtgagtggtcagactgggattcagagctgaccccagggagcagcgaagagcaggaaggaagggagtctgggtggcagcatcttagtctgcagggcagttctaagacaggttcagcaaggcctttgaggagtcctcagccggccatctgtcagaggatcccataatgggcctaccttactaccctactgtgctcaggcactggctggagcagcccatggaaagcacagcctcacccccaatgcagtgaggcagttcagagtgcaatggccaaggccctgagtccattgcatttcctgcagtcagagatgtgagtggcacattctcacagccaccatgtggtagaatgggagttacatccacggagctaaaatcctacagatggtgtcagaaaaaggatttgggggcaacactcctgtaaaggaagacggctttttctgtgagagaggctgatcctcttccgccttgctcactcccactgtggtaggctgaaaaatgcattctctcctggcacaagatatccattcactgattcctggaaactgtgaatattaccttatttggaacaagggtctttgcagatgtcattggattaaggattttgagatgaggagattatcctggatcatctgggaggggatgccctaaatgccaatataaatatccttataagagagagaccaggtatatctatacaatggaatactatttagcaattaaaaagaacaaaattctgtcatttgtggcaacttagtaagcttggaggacattatgttaagtgaaataagccaggctgggtgtggtggctcacacctgtaatcccagcacttttagaggctgaggctggcagatcacctgagggcgggagttcaagaccagcctggccaatgtggtgaaaccctgtctctactaaaaatacaaaaattagccgggcatggtggtgggcgcctgtaatcccagctactcaggaggctgagtcagaagaattgcttgaacccgggaggtggaggttgcagtgagccgagactgtgccatcacactccagtctgggcgacaagagtgaaactgtgtctcaaaaaaaagcaaaataatccaggcaccgaaagataaatactccatgttctcactcatgtgtggaggcttaaaaagttgatctcctagaagtagagagtagatcaatagctactagatgctgggaagcagaggaggggggagatgactagaggctggttgctgaatacaaaactacagctagataagagttctacagcactatagagtgactataataaacaataatttattgtatattttcaaatagctagaaaagtggattttaaatgttcccaatatagagacatgataaatgagatgacgaacatgccaattacctgatacgagcattacacattatatactgtattgaaacatcacattaggtgggtgcggtggctcacgcctgtaatcacaacattttaggaggccaaggcaggaggattgcttgagcccaggagtttgagaccagcctgggcaagatggcgaaaccccatctctaccaaaaatacaaaaattatcagggcatggtggtgtgcacctgtagtactagctacttgggaggctgaggtgtaataatgagaggcttataatgaggggaaaatacctcctattgtttaagccagtgccgcttcttgcagccaaatgagtatctaacacattcatattttgataaactctgatctaaaggatgttggcagagagagcgagcgagtgaaagagaggagagagctgggcacagtggttcacgcctgtaatcccagcactttgggaggccgaggcgggtggatcacgaggtcaggagatcgagaccatcctggctaacacagtgaaaccccgtctctactaaaaatattaaaaaaattagctgggcgtggtggcgggcgcctgtagccccaattacttgggaggctgaggcaggagaatagcgtgaacccaggaagcagagcttgcagtgagacgagattgtgccaccgcactccagcctgggtgacagagtgagactccatctcaaaaaaaaaaaaaaaaagaaagaaagagaggagagagagagagagaggtttttacaatagaagatggggtttatttcaaggctgaacgactttgagactttttccctggtacttcactgtcccctccttttgaactttggcagtttctgtgacagctttgaccaattgaatatagtaaaagggatgctgtgccacgttgtggtctataaaaaatcagaagtttctgcctcctgtctccctgagtgctcactctgggggaagccagttgtcatataagaggtcagagtatcctgaaaggaagcgcaagccagctgcagggagaggtctcatggagacagtgacacctgaccagctctagctgctccagccaccctagtctagggccggggatgtaagtgaagatgacataaacctctggcaccatctgcctgtaactgcatgaggcaagtgacagctgcccagctgagaccactcacccctggaaccatgaaagatcatcataaatagtgttttaggcccataagttttggggtagattgttatacaggaatcgatactcaggacagagaaacacagttattatcatcattttacaaatgggaagatggaggcttagagaggctctccaataagaacatcaagccagagtgtggccagctgacatgtgagtcctatgctgtccaattccagctgtcctggtttggagagcgtttggaaaggaaggtgtagtgagggagttgagattagaaaagggtcccctgggccgggcgcggtggcttatgcctgtaatcccagtacttggggaggccaaggtgggtggaccatccgaggtcaggagttcaagaccagcctgactaacatggggaaaccctgtgtctacaaaaatacaaaaattagccaggcatgattgcaggtgccggaggctgaggcacaaaaatcgtttgaacctgggaggcgaagggtgcagtgagctgagattgcgccattgcattccagcctgggtgacagagcaagactctgtctcaaaaaagaaaaagaaaagtgtcccctggcttagaggttctggagaccttagttctggtggaggcactcaaggctgcagtggctaaagccacgaatggaaggtaaggacatgaagaagtggcagagatcattccttcaagaaggttggttgtgaaaggaaggagcgaggcaggctaccatctggatatagtatctagtgtaggaagtgttatttctatttaacctttttattatgaaaaatttcaaataaacataaagtagaatagtataatgaagccccaggtacccatccaccagctatgataatcagcaaataactccatccattgggatttcatcctgaagtatatcccaggtgcataactttatctgttactatttcagtttgtattctaaaaatatatagccacagtatgattattgttgatgtgtgtcatgaatctcttttaggttcctcctccatctctatttttcccttgcaacttatttgttgaagaaagcaggttgttcaagaccagtctggccaacaaggtgaaaccctgtctctactaaaaatacaaaaaacattagctgggcatggtggtatgagcctgtaatcccagctactcaggaggctgaggcaggagaatcccttgaacctgggaggccaaggttgcagtgggccgaggtcgcgccactgcactccagcctgggcaacagagtgagactccatccaaaaaaggaaggaaaggaaagggaaggggaggggaggggaggggaggggaggggaggggaggggagggcagggaagggaaggaaggaaggaacaaagaaagcaggttgttttttcagaagaattttccagtctggattttactgattctatacctcagatgctaacatattccttagtcccttgtgttttccaaaattgacttttttttttttttttttgagatggagtctcactcttgttgcccaggctggagtgcaatggcgtgatctcggctcaccgcaacctccgcctcccgggttcaagcgattctcctgcctcagcttccagagtagctgggattacaggcacgcactgacatgccggctaatttttgtatttttctagagacagggtttctccatgttggtcagtttgctctcaaactcccaacctcaggtgatctgcccaccttggcctcccaaagtactgggattacaggcgtgagccaccacacctggccagaatttatagattgttgatcctctaattctatcattccttcttcactagctggaatacttgcataaaaagaaacttcccccttatcaacaatttaatccctgagatagagtttatagaaaaagtgaagataaaagtaagataatcttacatgagatagatcccttgcaacttcactgttctttcctagtgtaggtttcccagcccagcattataatctctccttccccaatacccttgctgctctgggcctctctacttttgtcctgcttgtctggaaaaacctcaccctgagggcctatatctctcaccttctctgggcctgctacagaactggtgagcactgctggaagaaaattgcaaagcatggctggctggtttcaaggacctctagcacgcacccaacacagctcctgggccaactgtgtgctctgtgagaccatagctgcttgagacgcaactagtgagaccaagcaactacatttccattcttatttaattttaattaacttaaatataagcagccccgtgtgactaacgcaggttatggaacattttcatgattccagaaagttctgttacactaggttaggaaacttgacttcccactccccaagagaaccagttcatagcctttcccccttgccttaaatctccccaaccattttctccactctcccttcattcttccttgagaataaagaatatgaaagcttccaggtgagctctccattctttactgagaatgtagaagctcctaatggaagctggcccagtctccaacctcaactcctctaaacctgtaacatttgccactgtggaggaatgtccatcctcttatggaagccaaagcctttatgatgatgcaagcccaggtcccttttgaattatcaaggactctgtcccttcacttatccccttccgccctgcatcattcatctcccctactctactggaacgcttccatcagcaaacagatgttctgtctttcatcttaaaaaatcctactgtatccccactcccttctacttctctggtccccattcataaataaacatgttgaaagtgtcactctgtcagtgcttctcaatatgtggtcctcaggctcttagcatcagcatcacttgggaattagtcaaaaattcaaattcctgggtaccaccccagactcactgagtcagaaactctgggcccagaaatctgggctttacaagctcaacaggtgattctgataattgtttgagaacctcaatatgttctacaatatgtgccatgcttttcactttctcctttattcttccttccatggaactccttccccctttgattttcatcctcaactcttcctcatagcttggctctggccttttcatcttctctatctttattctgtcccaaggagctcttacccatttcttagtgttaaatcccatgaattcaaagtcataaatgcaacccaaaattttcttagagttccagattcttacggatccagttgttggtatcttcatctgaatgtcttacaaacatcccagtaagtctgaaaaggcctggacgtttcccctcaatctctccttccccatgttcctgccccaggcttccccatttcaataagtagcattcattcagcagctgcagcaagaaacctccgagtcacgcttgatccttcctttctctcaccacccctccacactctgtcaactctaaccacgccagcccaccctgccttcactccgatgccaccatcctagtctccaccctcccgcattgcttgtctcccagctggtctcctcactcctgccttgtgccttccaatccattctctccatagtaagaaaggggaacttctggaaagctagaataaatcatgctatttaaaaattcttcaacaactttccaccatgagtagaaaagaatccagactcctgccccagcccacaaggtcctgctgatcaggcctctgcctccctatctgagcctgtctccttccgaccactccctggcctcccttgatccatccacactgacctccttcccttcttccaacaacccgtgtttcttcttacctcggcgccttgcttatcaatggtctccccactctcctttgtcatccttcaggtcttggatcaaatgtcatgctgcagagttctttccaccctcttgaaaaatgtcaggcctcagcctggtgtggaagggaaaggaaggtggaagaagcagcaactctggccacctgtctctgacatcattgatctccatagaagggcacgaggaaagatgaagagtacgtggttaggagatggattctctccctgtccctcagagaagaaaagagtcacagtctttttctggaagagttgtgtggggatttcgcccctgtgcatggaagaaggcctgagacagccctaggacgatattttctctttaagtcctgagcccactgaatgggtgtgcttctttttgtatactcaatacctgctgggggaaacacgtctcctccaagcccaggctatgtgttttccaaccttcaactgcagaagtgggtcagtgacctacgccaggccaaaacatctcagacatgagaatggctcagggattcacatgtgacccgaagtagccccatgagaatcaagcctatgacttttgctagattcacgataaacatgagttctcttttttccttttcttttttctttttcttttcttttttttttttctttgagatggagtctcactttgttgcccaggctggagtgcagtggcatgatcttggctcactgcaacctccgcctcctgggttcaagtgattctcctgcctcagtctcctgagtagttggaattacaggtgtgtgccaccatgcctgactatttttttatatttttagtagagatagggtttcatcatgttgggaggctggtctcgaactcctagcctcaagtgatctgcccacctcggcctcccaaagtgctgaaattacaggcatgagccacggcgcctggcctgagttctctttgagctgcagttaataaactagcagaatgtgagctggaatctgcagcagattatttttgtctctgcatggaaaaaaaaatggtaaaaaggaagccaactcagaggcgagcaaggcagcttttctttgtggaatgacttggggacccagactacttcccttgtgtggctctgccatctttaggaccttggttccctttggctctagcaagcagcagaagaacaaaaatgaggattctccatccactttaaaaattccagcctagaagtgatacatgtcacttctattctcattctattgcaaagcattagccatctggccacacatagatacaaggagggcgggaaatggagtccctgcatgggaatccatctttaagagacagctccatgctatggaatgagcagcacaaatttttggagaagcaccagtcatctctgacacctgcagggataataaagggacaggaaatatggctgggaagatagggtaggcaaggttttgaaagccctgaacatacaaaattattcggacttcattctatgagcaataaaaagccatgaaaagctttgagcaggagggtagatgatcacatctacaatagaaagataattctgaaacagggtaaaagatgaaacaagggccgggcgcagtggctcacacctgtaatcccagcacttttggaggccgatgcgggtggatctcctgaggtcaggagtttaagaccagcctgctcaacatggtgaaacaccgtctctgctaaaaatacaaaaattagctgggtgtggtggcgcatgcctgtagtcccaactacttaggaggctgaggcaggagaatcgcttgaacctgggaggtggagtttgcagtgagccgagatcgcaccacttcactccagtctgggcgacagagtgagactctgtctcaaaaaataaaaataataaaaataatagaaaacaaaagaaaagaaacaaggttgccatggtttaaatgtggtgtcctggtgtcccctccaaatttcatgttgagacataatgcccattgtggtgggattaagaggtgggcattttgggagatgattaagtcattaagtcatgagagctccactgttatgaatggattaatccctttataaacaagggttcggagagagtttacccctctattccacccggtgaggatgaagcaacaagacaccatcttggaagtaaagagcagcccccactggacaccagtgctgacccagaccttggactcccaagcctccagaaccaaaataaataaatttctgttcttttaaaattacctagtctttggcattttgttacagcagcatgaatgactaagacaaaggtgtattggctacatctagtagagcctcttcagattctcttgatatgtggaccccaagctgctggtttcaacccagcagctgccatgcctcttgtcttcattatgtcctttcttcaactttctttgggttttagctggtattctttttacagtttcttttcttttccttttttttttttttttttttttaagaggcagggtcttgctctgttgctcaggctagagtgcggtgacaccgtcataggtcactgcagcctgtaactcctgggctcgagcacctcagcctcctgaatagctaggactataggcatgcaccacttcgcctgggtatttttttttttttttttttttgagatagggtctcgttctgtcacccaggctggagtgcagtgatgcgatctcggcttactgcaacccccgcctcctgggttcaagagactttcctgccttagcctcccgagtagctgggattacaggcgcccaccacgaggcccagctaatttttgtattcttagtagagacgggatttcaccatgttggctaggcaggtctcaaactcctgacctcaggtgatctgcctgcctcggcctcccaaagtgctgggattacaggtgtgagccaccatgcctggcctgttaatgtttttgaaaaaatttttgtagtgatgggatctcactatgttgccaaggctggtctcgaacttgacctcaaatgatcctgctgcctcagcctcctcaaatgctgggattacaggcatgagccaccatgcctggcctatagcttctggagatagaaccatttcttcttttctaatatatttattaagctttaaatttccctgtaagtactgtgttagctatattccacacattatgctatgtcatatcttccttgtcattcagttttcatttccattgtgaatctttccttggctcacgagttatttaggtatgttttgctatttttgtattctgtctctatcaacaaacaaataaagcagaggaaaataaaacacttaggaaaaaaatctattgagtgatttccaacgataacatatggaaggatttaggaatatagcaatttctattattgtccatgagagctaactaaaaggtgctaattacataatggagacaattttaaagaaccaaaactgcctagctataattgagtatctttcccactagcccataactatgaaccatgatggcttaatacaatctcatacttacctttggtctaataacacctctttactcacactaattttctttttcaatttagataaatcatttgagagtccatatacagttttgactttggagtttcatgacttcaagacagcttattaaaaaagccctcgcaaggaacttgtagtaaacttttgttgtgttaactgcgctctgtggttccccctagcatcttctggagaagtcagagcctgtgccccgcaaggctgtgctttagctgagcccattaacaatgggaggggccaaagaagtagggcttgctcaactcggatggaaagctaggctgatggtgaaggtggggggccaccattgacccagtttccaggaggcaggtgctgacctagcggtccactacatggtggaagcccaaggaaggccagaatacttctagaatcactggctgtggctcggaggggacctgggaatacacatctgagtcaagtcgggaaggtatgtaagttgaatgcaatacagcatattttatagtataaaattaaaatttgcaaagataattttattgctagcattagatgatagaggaaaggaaaggaagaaaagcatactaattttaccattgttcatagcaggaagcgaacatctaatctaatgtctaaaggaatcgagaattgagtctaagtatattgcatacatttacatatattcaccagaacaaaaatacaacattcctaaagatcagaagacatgagtgagaaaagacaactaactttcctatgcagaagaaatccaaaatattatgtagatactctgcttctattagatttgtattgctgctgtaacaaattaccacaaatgtcatggctgaacacaatacaaacttcctgtcttacagttctggagtcagaggtctgacaagcgcctcagtgggataaaatccaagggtcagcaggctgtattcctctctgcaggctctaagggaggatctatgcccttctcttttccagattttagaggctgcccactttcctcagcccacggtcccttccatcttcaaagtcagcaatggcaagctgaattctcgtgtccatcactccaacctcctcttctgcctctctctcccaccatttttttttttttttttttgagacggaatctcactctgtcgcccaggttggagttcagtggcacaatcttggctcactgcaacctccgcctcccggattcaagcaattctccctgcctcagcctcccgagtagctgggattacaggtgcccaccaccacgcgcggctaatttttgtatttttagtagggagggggtttcaccatgttgtctaggctggtcttgaactcctgacctcaggtgatccgcccacctaggtctcccaaagtgctaggattacacgcatgagccactgagccctgtttttttttttttcttccttccctccctccctctctcccttccttccttccttccttcctccctccttctctccttccctccttccttccttccttcctttctttctttctttctttcttctttctttcttttcttttttctttctctctcctttttcctttctctctctctctctctcccccccgcctctttctctctctctctttctttctttctttctttggtcttgctctgttgcccaggctggggtgtagtgatgcaatcttggctcactgcaacctctgtctcctggttcaggtgattctcctgccccagccacccaagtagctgggactacaggcgggtgccaccacccctggctgatttttgtatttttttgtagagacggggtctcgtcatgttgcccaggctgtcttccacttttaaggatccttatgaacacattcggtctgcctggatattccaggataatctccctattttaaaaatcagttgattagctgggtgatgtggctcacacctgtaatctcagcactttgggaggccaaggcgggtggatcacttgaggacaggagttcgagaccagcctgcccaacatggtgaaaccctgtctctattaaaaatacaaaaattaggcgggcctggtggcacgtgcatgtaatcccaactacttgggaggttgaggcaggagaatcgattgaacaggaggaggaggttgtggtgagctgagatcacgccattgcactccagcctgggcgacaagagcgaaacttcatctaaaaacaaacagtccaggcgcgatggctcatgcctgtaatcccaacactttgggaagactagacgggcagatcacctgaggttgggagtttgagactagcctggccaacatggaaaaaccccatttctactaaaaatacaaaaattggccaggcatagtggctcacacctgtagtcctagctactctggaggcggaggcccgagaattgcttgaacctgggaggtggaggttgcagtcagctgagatcacaccactgcattccagcccaggcaagagagtgagactcggtctcaaacaagcaaacaaacaaaaaactcgataaactccttacacaaagacacatctaaaataaagtgaaaacaaagtttgaaaaattacctttttagaatgacttaggagggggaagtaggggtgaagagaagttggatatacgcacaaaaatataatttgatagaaggaatgagttctagtccaatagtacagtagggaaatcgtagttaataattagtgtatatctcaaaatagctagaagataattgtaacattcccaacacaaagaaaagatcaacgtttcaggtaatggatatcctcgttaccctaacttaatcattacacattgtatgcatgtatcaaaatatcacatgtactctcaaaatatgtgtaactatgatatatcaattttaaaaagacagaaaaaaaggatttaggtccagtttaccagtgaaatccttcaagtgtccaagttattaaggatcagctaattattatgtagtgtatgtctctactgtataaaataacaataaaaaacttttcaaagcatttttgttttgtgtgagacagggtctcattattttttatttttattttttgactgtcctaaattgtttattaggtatgaattttacaaacttaaactttacttatgtcagtggcaacagtggagctggagattatcacattttctccaagctgcatgacgagacccaccaatagtgtggtggaacttaaggccctttccaaggccatggctctttcggcctgcagatgtcagcccacgtgtctccctgggcttgtagactgattggtgatccactgggtgtcaggatttcttctgacagcttaatggaatgcatcaatgaggataacctcaaaaaatttgtatgtgaaatcttcaactcagtaagaattcaggactcttagagccccacagtggtgtccagcttgctcctctgcaatggactgagggttcaagcaaagtttagctggttaacaccatgatgttcaggcttgccgtaagttgcacccttaggaactgggtgtttttggccatcaccgcacacatgaatcctatatataatgtagccttgtagttcagtcggcgcactttatggggccaagtggattggggagccctgtggagagcagagggctggcagtactgccagcagcggaccctgagaagaaagcgcatgagatcagactgcttctccctccatagctcctggatgtacttgtatgcacccaccgtggcttacctgatggctactgccagacagaaaggcggggtctcactcttttgcccaagctggagtgcagaggcgtgatcatggctcactgcagccttgacctcctgggctcaagcctaagtctcccgagtagctgggactacaggtgagcaccaccatgcctggctaatttttgtattttttgtagagacagggtctcactatgttgtacaggctggtctcaaactcctgggctcaagcaatctattcaccttagcctccccaaagtgctggtattataggcgtgagccaccacacccagccaaaatattttctgaaagaaaacaaaatcagaggccaggcacggtggctcatgcctgtaatcccagcactttgggaggccgaggcgggtggatcacttgaggtcaggagttccagaccagtctggccaacatggcaaaaccctgtctctactaaaaatataaaaattagctgggtgtggtggcatgcacctgtagttgcagctactcaggaggctgaggcaagagaatcgcttgaacccgggaggcggaggttgcagtgagccaaaattgcactactgcactccagcccaggtaacagagtacgattctgtctgaaagaaagaaagcaagaaggaaggaaggaaagaaaggaaggaagaagagaaggaaagaaagagaaaaagaaaacaaaatcagaagagccagacatcaagagccaagcaaatagaccataaaatactttttaaagtaaaatatatttttaaaaatatggttaatgcatcaagaaaaagaaataaaggtcttctttttaaagttacaaaggtaactaatagaatttaagaataaaataatgggagaaatagagtagataagtagggcatgtaaagaggttaaattgtcatactcgtgttggggaactcatggatgttgtatatttgtacatcaacaaataaaagagttgccattgcagccaaaatctgtggggaattttggtgcagcgtccagccactccactcccagtgacagctcggagttctgtctggatatctaccctttcccaaccctgttccacatggtctgggtggagttgtctcaaattcagcttatctgttcctgcccaatgagtcaaccacgccgtttaagagctttagcctctggcccaggactctgtacctgcaaaacctttcttacttttgcaggagccgtccctgtgaaattgggtatgtttaatgttaaggggagctctgggtactgttttatttctgtgtttatgggcttgatattctccttcatttatcggaagaaggaatggcgtctttcctagatgggccagagaaggccctagtccttgctatgggaaaagactcctggtggatgggatgcgggaaaggaacaggacatttgttgtcagcaccctgtggcagacactgtccatatgccatgcacaaccccgtggcatgcacccctacacaatgacggctgcctactgcaaacacctccaagtcctcctctgccggaaggttctctctctccctctctctaccccttcctcctccctgtccccacccccttccttaagagcaagctaggctggcaaatagggcaagctgaaagttctgtatcaatgacagataaggagctgtcgggttcgcactgcagctttctcgcccctctgttgggagaactctgaagcatcttctacaccgtctcccaagctctccagggggagtgggctccgggtgcccgcagagataacttgcttgataacgcagctttcttttttcttttttttttgagacagagtctcgctctgtcgcccaggctggagggcagtggcgcgatctcggctcactgcaagctctgcctccggggctcccgccattctcctgcctcagcctccggagtagctgggactacaggcgcccgccaccacgcccagctaatattttgtatgtttagtagagacgggggtttcatccgtggtagccaggatggtctcgatctcctgacctcgtgatcctcccgccacagcctcccaaagtgctgggattacaggcgtgagccacagcgcccgggggataacgcggctttctttactggctctcttccttttcttatcttgcttccctactccctgaaatcatctctcaaactacttgcaattaaatactacagagtctgggagacctctcattaagattcatccagtcccactctctcagtaagggccgctgggttctgctttccttgacacacccctcgttcactttccctctgtgtgcttccagtggctccatcccaaccccaggacagggcacatggatcacacctagccaatcagcattgatcttttaccagccacagggaatggcttaggggcagcttgtgaccggttcgaagccaatgaggtgtgaggagtctttagcgggtagagaggcccgccctgctccctgtgcacctggaagaatgaagcctggatccgccgccatcacctgccagcctgtctgaaaatggagccaacaaggagggctgctggatggagtgagaaaccaggccctgtggtagtgtttgagcccctgaatcaagctgtgcttcaagctagaattatcccgagagttttcagtgaaacgagtcaggaacttctctattaaacccattttgagttgtgactaagatgcctaatggatacaagacagagaaagggccttctcctgggtctcccttatgagaaacagagagagaggtggttgctgccttggctctgtggccgagcaggtgcagttcagacagacgtggtgggaagtgatctctgcttgcataggaggggaaacccacctgggctgctcccgtccctggggggtgccaggcactcccagcccaggggatcaggcccaggggaaggagggactggaggtatgttcagctggggctccctgcaggaacgctgaagccagaacggaacaaactgcgaacagtgccatacgaacactgcactcactctaaacccaggtgggattaaaaatcggcagatctggccgggcgcagtggctcatgcctgtaatcccagcactttgggaagccgaggcgggcagatcacatgaggtcaggagtttgagaccagcctggccagcatggtgaaaccccgtctctactaaaaatacaaacacatgcctgtaattccagctacttgggagggtgaggtacgagaatctcttgagccctagaggctgaggttgtagtgagccgagatggcaccactgcactccagcctgggcaatagagtgagactcagtgtataaaaaaaaaatcggcaaaaatctgaactcgaaacagacaaatcgggaattacaggaaagcaatctctctcctgaaagcgactttggggaaattggaagcccttcctactccacagatccaccagttggcccatgacagtattgggacacaatcctctccctgcccaacgaggattgccccaaattaaaatgccaatgcctccgcccaaagtggcattattggctgttagtagactttaatacttacacaagggttattatagaatttcacagagcagattttgcagggtgcaagaagtaaggaacccggagggagggctcagctacagaggataaaggattcagcactggtcactcccgtatgctcagagtagacgttaagactgataagaggcatgagggagactcagaggacattcttctgctcaaagataagaaaactgttttacctggcatttacttgtactctaagcatatacctgattctctgagtcccaccttaggccaaatccggctaacccattcatttacagtttgtcttctggctacttttgcactacaatggcagagctaagtagttgcctcggagactgtgcggcctgcaatctctaaaatatttgctctctgtcccattacagaaaacgtttgttgactcctctaaatcagtggtcctcaaacttgagtgtgttagaattcccccaagggtttgtttacacggaaattgctgagctccatcgcagggtctctgattcattaggtctcaggtgggaactaagaacagttgatccttgaacaacacaggtttgaactgtgtggatccacatatatatatagatttcttttgcctctatcacccttgatacagcaagaccaagcccttctcttcctcctcctccttggcctactcaatgtgaacatggtgaggatgaagacgtttgtggtgatccacttccacttaatgaatagtaaatgtattttctcttccttatgattttcttaataacattttgttttctctagttaactttattgtaagaatatagtaataatttatataacatacaaaatatgtgttaatcaactgtgttatctgtaaggcttccagtcaacagtagggtattagtagttaagtatttggggaatcaaaagttaatgcaggcccggcacggtggcccatgcctgtaatttgagcactttgggaggccaaggcaggtatatcacttgaggtcaggagtttgagaccagcctggccaacatggtgaaaccctgtctgtactaaaaatacaaggattagccgggtgtggtggtgcatgcttgtaatcctagctacttgggaggctgagatgggaggatcgcttgaacccaggaggtgaaggttgcagtgagccgagatcgcacaactgcaccccagcctgggcaacagagcgagtccctgtctcaaaaaaaaaaaaaaaaaaaagttaattcagattttggactgtgcaggtggtggcaccccagcccctccctcgttgttcaagagtcaactgaatggccatttcttttttgttgggagttggggagttccggtgaagacaggaaaacctgttagacaaattctaaaagagctgtaaccttaatttccctttctaacgagctcccaggtgctgttgctgctgctgtccttgccgtctccacattgatgcacctgagaaagggcaaaagcaaaatagccggaagtggctcaggtcattcactcctgcctacttctcattagcccaatattagaggctgggaaatatagccactggttaggcagccatgtatccaggaagatggaaaatagatttgagaggacaactgggaggactagagtgctgcattattttctagggacttaaaacacacacacacacacacacacacacacacacacacacacacacacaaagacttagttctctctcctactacatgttcagcttaggtaagctagaggctagaggcttgttccaggttgcttttgtcctcactttacaacccaggttgaaggagcaagtgctacatttttcaaatgttgctttaaaaaattttgtattggctgggcggggtggctcacacctgttatcccagcactttgggaggccgaggcaggcagatcacatgaggtcaggggttcgagaccagcctggccaacatgataaaaccctgtctctactaaaaatacaaaaattagctagatgtggtggtgcacgcctgtaatcccagctacttgggaggctgaggcaggagatcacttgaatccaggaggcagaagttgcagtgagccgagatcacaccactgcgctacatgccactgcactacagcctcggcaacaaagtgagagtctatctaaaggaaaaaacaaaaaacaaaaacaaaaaaaacctttgtattgaaatacaacatgtatacagaaaagtgcagaaatcaaaagtgtatagctcagtggctttcacaaagtgaacacacccatgtaaccaatgcacagacaagaaacagaacatgaccagtgcgccaaaagtcccctcacccccatctagtcaccatctcactttcaagggttgctactgtcagaggtgtgtaaaccagaaaactccatcttaaataggagctgggtaaaatgaggctgaaacctcctgggctgcattcccagacggttaaggcatcctaagtcacaggatgagataggaggtcagcacaaaatacaggtcataaagaccttgctgataaaaaagattgcagtaaaggagccagccataacccaccaaaaccaaaatggtgacaagagtgacctctggccatcctcattgctacactcccaccagcaccatgacagtttacaaatgccatggcaatgtcaggaagttaccctatatgatctaaaaaggggaggcatgaataatccaccccttgtttaccagatcatgaagaactaaccacaaaaatgggcaaccagcagccctcagggctgccctgtctatggaataaccattcttttattcctttactttcttaataaacttgctttcactttgcattgcagactctccctgaattctttcttgcatgagatctgagaatcctctcctgggtctggatcacgacctctttcctatagtactactgttggccaggtgcagtggctcacacctgtaatctcagcactttgggagaccaaggctggaggatcacttgaggccaggggtttgaggttacagagctatgctcttgccactgcactccagtctgagtgacacagtgagaccctgtctcaaaatattaaaaaaataatttaaaaatttaaaaaaagggtaaccatcatcatgccacagatgagttttcctgttttgaactttatatactaagcgtcggtatacaaagatgtgatgcacccagaactttcacccaccgtatattgtgctgtacggactctcctgtaactgattctttcactcaacagtttgtttgtgagttttatctgtgttgttgcatgcagcaaacatgcaacaaatttctattgtggtttttttttgcattgctgtgtaatattccataaatagatgatttgtttatccactctacagatgatggacagtatttatttctagtatttgactagtactaatagtgtttctatgaaccttttaatagatgtcttttggtgaacatgtatttgcatttcttttgcagatacgtgttcccaagccttgtggtggcactactgggtcatagtgctaggggaggtatatgctcagccttagtagttattgccaaactgttctctaaaatgtaccaattcacaggcttattagcaatgtctgagagttccagttgctgcacatccctgccagcacttagaacttcacgcaccgaatctgatccagctggactttgccggaaagcacatagacaactttcattttgcaaagccacaggctgcctggagagacacacatgcaatgtgtgacgagtacgacacctcacccagtgctctgtcattggaccagggagctcaaatgagcaacccaacagtacagatataaaatttggagattttatataaaaatctggctattttgcttctgaaaaaaaaaaatgaaggatccagcaatagcgggcccaagttcccgcatgaccataaatggccagagttgagtgttggtatctgccagtccatccactgtcaccatttcccgatccacttcactcattgaccttcgctcccagactgtagtagataattgagtttcctgcggtggactccagccttccttcagcccagatcaagacgcccaacataaccaagcaaatatttccaatacatttcttatatcctaccaagggttggtagtggagatattctcatatccaacccttggtaggatatgagaaatgtgttggaaatattttctctgcccccaagatatctccactagtacaaccttttctttgtattaagaattgctcttggccgggtgcagtggctcacgcctgtaattccagcactttgggaggctgaggcagtcagatcacgaggtcaggagattgagaacatcctgaccaacatggtgaaacctcatctctactaaaaatacaaaaattagccgggtgtggtggcgcatgcctgtagtcccagctactctggaggctgaggcaggagaatcgcttgaacccaggagggggaggttgcagtgagccgagccacgccactgcactccagcctgggtgacaagagtgaaacttcatctcaaaaaaaagaaaggaaaggaaagaaaagaattgctctcttcctgcaggcatatctcaagtagaataaagagtactggaaatgatgagacagtacattgttcttttgatggtgaatatctccaatttcagattttcttttttcctgtggaacacaccatcccaaaactcagtggcttaaaacaacattttattggaacttgattttgtgggtcagtaactagaccagagcacagtgggaatagctcatctctgttccatgatgtctggggtctcagctagaatggctcagatagccgaggtctggctggaacaattcaactagggtatgtctaggcctcacccttggtgttgcctgggttcctcagttctctctacatggcttctccacgaggttattatctggggcttcctcacagcgtggtagtctcagggtagttccctgaggctgccacacctttttcaggcatagatctgaagctggcacatcatcatgtacaccgtatttcattatcaaagcaagtcacaacgtaagcccagattcaaggtgagcaaagatagcctccacttctcagtggagaaaactacaaggaattggtggccatcttttttttttttttttttctttgagacggagtttcactcctgtttcccaggctggagtgcaatggcgtgatctcggctcactgtaacttccgcctcctgggttcaagcgattctcctgcctcagcctcccaagtagctgggattataggtgtgcaccaccacctgtggctaattttgtattttttgtagtgacagggtttccccatgttggtaagtctggtctcgaactccagatctcaggtgatgtccccacctcagcctcccaaagtgctgggattacaagcatgagccaccacgcccagccttggtggccatctttaatctaccgcagcttctccacttcctgcctctctttccttttatcctccctgccatgctagtttttttgtttgtttgagacgcagtttcattctttttgcccaggctggagtacaatggcctgatccctgctgattgcaacctccgcccactctgggatcaaatgattctcctgcctcagcctaccaagtagctgggattacagacatgtgctaccacgcccggctaattttgtatttttagtagagatggggtttcactatgttggtcaggctggtcttgaactcctgacctcaggtgatccactcaccttggcctcccaaagtgctggaattacaggcatgagccacctcacctggctatgctgttttccagaaacatgtatggtatgttccaagtactatgctagttagtagcacagagataaaacatagttcttgacctcaagaagcttacaatctactggacaaaataaattgacagctacaataaagagtggaaaatgcatgtatacatgtgcacacagggccttttaaaagaggccaatatattatccatatttgtaaaccccacaactgattcagatcctaggtcatgccctctataaacacaaattgaaccaagaattagtaaatgttattaatacctgagaatgaatgagtttatctgggcatttcttttctttttcttttcttttttttttttttttacacggagcctcactctgttgcccaggctggagtgcaatggctcaatcttggctcactgcaacctctgccccccagattcaagcgattctcctgcctcagcctcctcagtagctgggattacaggtgtgcaccaccatgcccagctaatttttgtatttttagtagaaacagagtttcaccatgttggctgggctggtctcaaactcccaatctcaggtgatctgcccacctcggcatcccaaagtgctgggattacaggtatgagccattgtgccggcctgagcatttcttatgaggagacaaaattagaaagatgtcttgaaaaatgtaaagaaaataggccaggcgctgtggctcacgcctgtaatcccagcactttggaggctgaggcgggcgatcacctgaggttgggagtttgagaccagcctgaccaacatgggaaaaccttgtctctactaaaaatacaaaattagctgggcgttgtggcgcatgcctgtaatcccagctacttggtaggctgaggcaggagaatcgcttgaacccgggaggcggaggttgcagtgagccgaagccatgccattgcactccagcctgggcaacaagagtaaaactctgtctcaaagaaaaaagaaagaaaaagaaaaatttaatgaaattaactgcccagttattaactagactagtgataaaaattactagtcaggatttaaaattttctactatttggcataaaatattaatttatgcatgctgagtcattgaagcaccccaagaacctgaacattcttaggggacactctttggaaatggctggcgtgagcatttcagaggtcactgggcctcagagctgggggcctgggaagagggagaaactaggagggacttacaggggtggcaggggctggaagggcaaggggaggatcgagagtgatttcatttatctcatgcttctgcctggaaacctgtaactgaattggcacttgtcatggtgaggctatagctgtttgcgggaaaaaaacaaacagttgtttgtttaagctattgcttatcaggttttctgttagttgcagtcaaatgtttttctaactagacagcctgtaggtggaaagtggggcctttggagaaggaggatggagaaatggatgccgcaaaagtgtcctgggccaggttccctagcaacagagctgaaaacggggatgcttgtgcaaaggctttactgggagagtgctcacagggaagtgttgtaagggagtgagggaagtaggctgggcccggaggaaaagccagacaggcatgtggattcaggtgaagtcctgtctcagcctcatcccacaggagctctgaagtataagttgcaacattgtgaacctgtctgcctcgtgtgtgtgtttgggagatggggggtaggatgaaaattgtgtggcagccccaactgctgagcagcactggataaagctgaaggtgtgagccttagcaaccgcatctgcagcagctgggggcagtaaaaggaatcccaggggtccacgcaggcaccaacagcatctgctgcagaggatggctaattctttgtatgatttatggcaaatcttaaaaggtaatttatatgcacacacacaaaaatagctaaaatgttacctacacactgaccagaatacttcctaaatggtgaagaaggcagagagcaatcggaactcttttacgttgcaggctcaaccactttggaagacgatttggctgtacctgctaaagtgaaacatatgaagaccctacgatcaagcaattccactcccttgactataccagtagaagtctgtccatcaaagacttgtagtaatgtcagcaataaaaaggaatgtacagacaggcgctgtgtagtgacagggataggttctgataaataagtatttgtgtatatctaaacatacctaaaccagaaaaggtacaggaaaaataaggttttataatcttatggaaccaccgtcatatatatgatctgttgttgacagagacgaacttatggtggtgcatgcctgttgtgttggtgaataccacaggaattatcttggtgaaggaatccagtctccaacagttacatgctatatgattccatctatatggcattctcaagaagaccaaagccatagtaatggaagacagatcagtagctgtaagggactggggaaaggggaggggattgtgattctaaggggacagtaggtgagagtttttggggtgatagaaccaactatatcttgatattgtggtagttacatagatctatacacatgttgaaatccatagaattgcacaccaaaaagtcaaatgaacaaaaataatttaaaaaatatgtataagaatgttcatagaaggtgtatttataacagcctaaacaggtagcctcccaaaagtccattatgagcagagcaggcatgcaaattgtggtatgttggttcacactgggaaacactacccagcactggaaaagaacaaactactggaacatgcaatagcgcggatgagtctcagatgtaatattaagtgaaagaggacagacacaaaagagagcacactgtatgattccatctgcataatgttcaaaatgggccaaattgagatgatacagtcaggacaggactggaaggggacataaaggagtcttctgggggtgctagaaatatattgtgatctgggtggcagcttcatgaaagtattcatttgttaaacttcatcatgctctacacttatttttttattattattattattaattatttgagacagagcctcgttctgtcgcccaggctggaatgcagtggcgagatcttggctcactgcaatctccacctctcaggctcaagcaattctcatgcctcagcctcctgagtagctgggattacaggcgtgcaccatcatgctcagctaatttttaaatttttagtagagatggggttttgcctgttggccaggctaatctcaaactcctggcctcaagtgatccactcgcctcggcctcccaaagtgctgggattacaggcgtgatccattgcacccagccatatacacttaagatttgtacttaaaaaaaaaaaaaaaagatttgtacttttgcttttaaaaatagtacctcagtgtttaaaaatgtaaattattttcaactgatttatacctgtctgggtgttataggtgttatgcgaggggctaaaatttattgttgattgttagttctttgacagctgactccttatctcaactcagcaaacacagggcactgtgctggctccagggtcaccagagaacaaagaagcagtccctacccttgataaatatttgctttcaataacaaaggggatgatgatatttggaatccatcaaattcaggattatgtttactcctgctgggtgaaaatgaagctatatgaggacaaataaccattttcctcaaaaggagaacactttttaaaagtgcttaaactaggctgggtgctgtggctcatgcctgtaatcccagcactttgggaggctgaggcgggtggatcacgtgaggtcaggagttcaagaccagcctggccaatgtgttataccctacctctactaaagatacaaaaattagccaggggtggtggtgggcatctgtaatcccagttacttgggaggctgaggcaggagaatcgtttgaaccttggaggcagaggttgcagtgagccgagattgtgccactgcactccaacctgggcaacagagagactctgtttaaaaaaaaaaaaaagtgcctaaactaggctgggtgcagtggctcatgcctgtaattccagcactttgggaggctgaggcaggaggattgcttgagcctaggagtttgaaaccagcctgggtaacatggcaaagcgctgtctctaccaaaaatacgcaaattagccaggagtggtgctatgcacctgtggtcccagctactcgggaggctgaggtaggaggatagtttgagcctgggaggcagaggttgcagagagctgagatggcaccactgcactccatcttgggcaacagaatcagaccctgtctcaaaaataataataataataagtgcctaaactaccactttgggattgggagataatttagattttactacaggccccttataaaggaaatacttgcttttgaactgtaagaaagcatggatcagaatccataccagaatgatcccaggagcagggatttttctatatgccatttaacttctaatagagctttctggaaacatagtgtacttcttttgtctccattttgtctgatttatgcttcttttgtcctatgcttaactcatgacagagttgccaaattaaaaacctaagtccattccttgtaagacaaatactgaaccttgactcatttatttgaggaggttatttactattaggtttgaataaagttctgatatgatttttacacttaacctttttccaagcttcctcgatactatctgcttttccttaaaatgcaaaacgaattccaaacataaactgagacaactatactttttaaaaatatgatttaagaagcacagtagttataaaatcaattactattggaaaagaatgggtgctgcatatactttcccaatattaactcatttattccacaaagatctgctcactatcttttacaatttagctcacttttactgacaacatgggaagcactgtaatagatgaagctttgtaaaagataagacacagcttttgtcaaataacaatacaagaatatataaaccacatatgaccatgtaagaatttgtaaaaatagccaggccaggtggcttacgtctgtaatcccagcactttgggaggctgaggcaggtggatcacctgaggtcaggagttccagaccagactagtcaacatggtgaaaccccgtgtctactgaaaacacaaaaattagttgggcatagtggcgggcacctgtaatcccagctacttggcagactgaggcaggagaatggcttgaacccaggaggcggaggttgcagtaagctgagatggtgccattgcactccagcctgggcaacaagagcgagactccttttcaaaacaaaaacagaaacaaaacaaaacaaaacaaaaaagaatttttaaaaattactacaaggacaccaagaataagagaagtgatactcgtggccatgagatgattaaaagcatttgcagtgggtatattgtacagcctttttggtaaaaaggtttgtatttgcctaaatacacttaaagaaactctggaaagatccatgaaaaaccaagacagaggttatccatggggcatgggagaagaactgtgcaaagggacaggagagtttttgctaagttccatcgtgtccttggaaaccctgtgaaatgtctaatatttgttttaaatggtacccagcattgttgtattcaggtatggaaagacctgcagacatgggaatgactatcatgaaggaagaagtttgttatgttcacagataccagaaactggaggcacagcgcgccatgcagggccatgcagggcagcaccagagttggtcaggaggcagagggagtgagtgtgggcagaagtctttagtgtggattccatgggagggaataggtgaggcagggtaagcgggcttgagattggctactttgagtaatttcagtgggctctaggctacaggaactgtccctgctttcccagtacctggccttggagtgaatagggcaggggaatatgagagtctgggccaggtatgagagtctgataaaggaggtggttggggtatgggcttcagatcggttagtttgtattggaaaggtgcactcgcagacgagtcccttactacctttagaaattggctagccctaggaggggcagtacctccaagtgagcaaggccctcaggatgttaaagtatcaagaaatacagaaaatgaaaaccacaattgatataatattgcatgtgaaatgattaaatattgacaggagcatttatgtgctccttcgtgggatggctgcctgatttacagcttcaacttctcagacacccaagatggctcccttcaatatgatatgacggcctctggccttggtccaggacaggcccaaggcaaaactgggcctacccaatgagatgctccctcctgaaaatctgatacttggaacagaagagacacaggcaaaaaatttctggagcttagttccttcaagggcaataataattattttccctatctgaatgtccgatatggcagccattaaccacatgtggctactgagcacttgaactgtgtgtggctagtctgaattgaaatgtactgtaagtgtaaattacacaccagattctaaagacagtacaaaaaagttgtaaaatatctcattaatacatttttatattgattacatgctgaaaggataatattttggatatattgggtcatataaatatatggaaattatctcgccttttttttaaattaaaaaaatttttttttttattttgagatggaggctccctctgttgttcaggctggagtgcagtggcgtgatctcagctcactgcaacccccgcctcctgggttcaagcaattctcctgcctcagcctcccgagtagctgggactacaggtgtgtgccaccacacccggttaatttctgtatttttagtagagacagggtttcaccatgttggtcaggctgttctcaaactcctgacctcggcctcccagagtgctgggattacaggtgtgagctactacgcccagactgtttatttctttcttaatgtgacttctagaaaatgtaaaaaaagaaaagaaaagacttacgcatatacacatgcagcgttccccaaagaaacagtcaatccttgcccaatccactaaagggaatcccaccagtcagccaccatcacacacgaaacagcacacacacagctccaacaccagtttttgtttgtttgttacttaaaataaaaaagactgtttttctttagagcagtgttaggttcacagcaaaatttgacaggaagatacagagttatcctatatatctcctgtccatatacacacatagccttcccatttatcaactgcccctaccaaagtggtacatttgttgcagttgatggatctacactgacatctcatcatcacccaaagtccatagtttattcactcttttgttttgttttgttttgttttgttttgtttttgagacgaagtctcactctgttgcccaggctggagtacagtggtgcgatctcggctcactgcaaccttcgcctcctgggttcaagcaattatcctgccttcagcttaccgagtagctgggattacagactcatgccaccaagcccagctaatttttgtacttttagtagagatggggtttcaccatactggtcaggctggtgtcaaactcctgacctcaggtgatccacctgccttggcctcccaaagtgctgggattacaggcgtgagccactgcacccagcctcaattcactcttggtgttgaacattctgtggatgtggacaaatgcacaatgacatatattcaccactatagaattatgcagagtattttcactgcttcaaaaatcctctatgctctgcatatgcatacttccctccccttaagtccaggcaacaactgatctttttacagttgccacagttttgccatttccagaatgtcatatagttggaatcatacagtaagtagccttttctgattggcttattacttagcaatatgcatttatgtttccttcatatcttttatggcttgatagctcatttctttttagctcacagtttattcatctgttcacctgctgaaggatatcttggttgcccccaagttttgacaattatgaataaacctactaaacagatttttgtgtggatgtaagtattcaactcttttgggtaaataccgaggaatatgattgctctattgaatggtaagagtatatttagctgcgtaagaaactgtaaaactgttttccaaagttgctgtaccattttgtattctcactagcagtgaatgagagttcctgtttctccacatccttattagcatttggcattgtcagtgttttggattctggccattctaatatatgtgtagtggtaaattgttgtttcaatttgcatttcccttatgacatatgtggagcatcttttcatatgcttatttgccatctgtatatcttctttggtgaggtgtctgttaaggtcttttgctcatttttaaattggattgtttgttttcttactgttgagttttaagaattctttgtctattttggataccagtcttctaccaggcatgttctagcacatattttctcccagtctgtgacttggctttttattctcttgtagtgtcttttgcagagcagaagtttttaattttaatgaagtccagcttatcaattctttttttatggattgtaccttcagtgttgtatctaaaaagtcattgccaaacccaaggtcatctagattttttttccatattattgtctagcaattttatagttttgcattttacatttaggtctgtgatttttcttttcttaagagatagggtcttgctatgttatccaggctgaccttgaactcctgggttcaagggatcctcccacctcagcctcctaagcagctgggacaataggtgggtgccatcctacctggcaggtctatgatgcatttttagttagtttttgtaaagggagtaatgtctgtccagattcttcttattatttttcatgtggatgtccaattgttccagcaccatttgctgtagagactatttttgctcctttgtcaaagctcagttgactgtgtttatgtgggtctatttctgggcttactattctgtccaattgatctatttgttcattctttcaccagtatcacactgtcttgattactctatagccttttagtaagtcttgaagttaggcatgtcagtcttccaacttcattttctccttcaatattaagctggctctcctgggtcttttgcctctccatgtaaactttagaatcagtttgtcaatatctttttgtaaaaaaaaaaaaaaaatttttttgagacaggatcttgctctgtttcccaggctagagtgcagtggtgcaatcttggcttactgcagccttgacttcccaggctcaagtgaccctcccacttcagcctctcaagtagctgggactacaggtgcatgccaccacacccagctaatttttttttttttcaacagggtctggctgtgttgctcaggctggagtgcaatggcacaatcttaagtcactcactgcaatctctgcctctgggactgaaaccatcgtctcacctcagcctcctgagtagctgggactacaggtgcatgccactatgcctggccaatttttgtacttttttgtagagatggggttttgccatgttgcccaggctcgtctcaaactcctgacctcaagcaatccacctaccttgacctcccaaagtgatgggattacaggcaaaagccaccactcccgacctaattatttatttattttttgtagagacaagtctcactatgttgcctaggctggttggtcttgaactcctgggcttaagcaatcctcccaccttggcctcccaaagtgctgggattacaggtgtgagccaccactgtgcccagccatcaatatctataaaatagaacttgctgggagcttgactgggatggcattgaatctataagccaaacagggaagaagtggcatcctggtgatattgagtctttctagtaatgaacatggaatttctctttatttatttagttctttgatttatttcattagagttatgccatattccttatatagctcttatacacaatttgttagatttgtacctaattcattttgggggctgctaatataaaaggtattgagtttttcatttcaaatttcacttgttcattgctggtatacaggaatggcattgacttttgtgtattaaccttatatcctgcaaccttgttaaaattgcttcttagttccaggagggttgtttttgtttttgtttgtttgttttggttttgtctattctttcagattttctgtataaacaatcatgccatctgtgaacaaagacagatttattttttcctccacaatctgtatactttttattttcttctcttgccttgtagtgttatctaggactttcagtataatgttgaaaaagagtggtaaaatgggccacctttgccttgctcctgctcctaatgagaaagcttctagtttcccaccattaagtataatgttagcttgatattctttatcaagttgaagaagttctctctattcttagtttactgagagtaattattatgaataggtatattgaattttgtcaaatgctttttctgcatctattgatatgtgatttttcttccgtagcatgttgatgtagttgattatgtgaactggttttcaaatgttggactagctttaaatacctagaataaatcccacttgattgtgatgtataatttttttatacattattgaatttgattgatttgctaatattttgttgagtattttgtgtctacaatcataacacatattggcctataatttcctttcctatttttttttttgttgttgtttgtttttttcagacagagtctcattctgtcacccaggctcgaatgcagtggcgcgatctcggctccctgcaacctcctcctcctgggttcaagtgattctcatgcctcggcctcctaagtagctgagattacaagcgtgtgtcaccacacccagctaatttttatatttttggtagagatggggtttctccatgttggccagactggtctcaaactcctcacctcaagtgatctgcccacctcggcctcccaaagtgctgggattacaggtgtgagcctcagcacccaaccagtttcttttccttataatgtctttgtctggttttgttattacagtaatgttggcctcatagggtgagttagaacgtattccctcagcttctagcttctgaaagagattataaaggattgatataatttcttccttaaggcctcacagcagctcactcctgtaatctcaggactttgggaagccaaggtgggcagatcacctgaggtcaggagttcaagaccagactggccaacatggtgaaacctcatctctactaaaaatacaaaaattagccaggtgtggtggcgcatgcctgtaatcccagctactcaggaggctgagacaggagaatcagttgaactcaggaggcagaggttgcagtgggctgagatcaagccactgcactccagcctgggcaacagagtgagactccatctcaaaaaataaaaatttattccttaaatgtttggtagagcctgttaatgaactcatctgggtctggtgttttcgattttggacagttgttaattactgatccagtttaatattatatataatgaatatatatatgaatatatatgaatgtatatatttatatatatgaatatatatgaatgtatatatttatatatgaacatatatgaatgtatatatttatatatgaacatatatgaatgtatatatttatatatatgaatatatatgaatgtatatatttatatatatgaatatatatgaatgtatatatttatatatatgaatatatatgaatgtatatatttatatatatgaatatatatgaatgtatatatttatatatatgaatatatatgaatgtatatatttatatatatgaatatatatgaatgtatatatttatatatatgaatatatatgaatgtatatatttatatatgaatatatatgaatgtatatatttatatatatgaatatatatgaatgtatatatttatatatatgaatatatatgaatgtatataccatctgaacatatatatatatgttcagattgcctatttctttttgtgggaattttggcagaagtgtatttattggattggtccatttcatctagttatcaaatttgtgggcatatagtttttcataatattcttttatatccttttgctatctatgggatctgtagtgatgatccttttttcattatgatattagtaatttgtatcctctttctcttttttttccctgtggtcagcctggttagagtcttacccattttatttatcttttcaaaaaccagcttttggtttcattgattttctttctgttgacttcttattttctcatttttttaaaattttttgagatagagcctcactctgttgcctaggttggagtgcagtgacacaatcttggctcactgcgacctctccctcctgggttcaagcgattctcctgcctcagcctcccaagtagcttaagggattacaggcacccacaaccacacctggctaatttttgtaattttttagtagaggcagggtttcaccatgttggccaagctggtcttgaactcctgacctcaggtgatgcacctgccttggcctcccaaagtgttgggattacaggtatgagccactgcacctggctgacttcctattttcaatttctttgactttggatgtaattttttttttttttttttgagacggagttttgctcttgttgcccaggctggagtgcaatggtgcaatctcggctcactgcaacctctacctcccaggttcaagcaaatctcctgcctcagcctcccaagtagctgagatgacaggcatgcaccaccacggctggctaattttgtattttttgtagagatgggggtttcactatgttggtcaggctggtttcgaactcctgacctcaggtgatccactcacctcagcctcccaaagtggtgagattacaggcatgagctgccgtgcccagcctcagctatactcagctataatttttattgtttatttctctctgtttactttgatttaatttgctcttctttttctaatttcctaaggtggaagtttagatgattgctttttctattctgtattttttttctataagactagtcaagtgcagtggtgagaaggggagaaagagtagaacaaggagtttgatctgtaactgtctgtgaacaatcaatggagataactcactaccttcagaccagcctagatgattgattttttatctttcttcttttcaaataaatgcattcaatgctgtaaatttccttgtaagtactactttcaccgcatctcataaatattaatgctatgttttcacttttatttagtttaaaatatttttaaatttcttttgagatttcttctttgagccatgtgttatgtagaagcagttaatctccacatatttgaagactttctggttatttttctgttattgatttctagttaaattccactgtggtctgagaaacagacattgtataatttctacttttatttgtttttttaacttttaatttttgtgagtacatggtaggcatatatatttatggggtaatgagatgttttgatacagggatgtgatgcataatagtcacatcatggaagatggagtatccatcccctcaagcatttatcctttgtgttacaatccaattattcttctttagttatctttaaaagtacagttaaattattattgactgtaatcacccgttgtgctaccaaatactagcccctagtcattcattctttttttgcgtgcccatgaatcatctctaccttcccctcataacccccattacccttccatccttctactgtctacctccatgggttcaattgtttttatttttagaccccacatataagtgagaacatgcagtgtttatctttctgtgcctggtttaattaatttaatataatgacctccagtttcatccatgttgttataaatgactgaatcttgttctttctttatggctgaatagtactccattgggtataagtagcacattttctttatctagtcatctgttgttggacacttaggttgcttccaaatcttggctgttgtgaacagagctgcaacaaacaagggagtgcagaaatctcttcaatatgttgattttctttctattggaaatatacccagcagtgggattcctggatcatatggtagctccatttttagtttgttaaggaatctccaaactcttctccataatggttgtactaatttacattcccaccaacagtgtacaagggctcccctttctccacatccttgccaacacttgtcattgtctgtcttttgaataaaagccattttaactggggtgagatgatacctcgttgtagttttaatttacatttctctgataatcaatgatgtagagcacattttcacatacctgttcaccacttgtatgtcttcttttgagaaatgtctattcaaatattttggccattttttgatgagattattagattttttttccctatagagttgtttgagctccttatatattctcattgatcccttgtcagatggatagtttgcaaatattttctcccattctctgggttgtctctctattttgttgattgtttcctttgctgtgtagaagcttttaacctgatatgatcccatttgtccattttttctttggttgcctgcgcttatggggcattactccagaaatttttgcccagactgatgtcctggagacttttctcaatgttttcttatagttcatagtttactttttaaaatttgttaaagtgtgttttatggccccaaatgtggtccctatcttagtgaatttctatgtggtggacagaatgtgtattctgctgtcgttgggtgaagtagtctatagatgtcaattatgtccaattaattggtggtgttgtgtatcaccaactatgtctttactgactttccgcctgctaggtctgtccatttctgatagaggggtgttgaaatctccaactgtattagtggatttatctaattcttcttgcagttctatctgattttgcctcgtgtagtttgatgctctgttgttatgtgtgtacacattaaggattgttatgtcttcttggataactgttccatttatcattatgtaatgcccctctttatcctttataactttcctcgctttgaagtctgctctgtctgatattaacatagctactcctcctttattttgattcatgtaaacatggtatatctttctccatttatttactttttaatcggtatgtgtctttatatgtgaaatgggtttcttgtagacaacatgtagttgggtcctgttttttgatccacatgatcatttctatctttttttttttttttttttttttgagatggagtttcgctcttgtcgcccaggctagagtgtggtggtgcaatctcagctcactgcaaactccacctcctgggttcaagtgattctcctgcctcagcgtcccgagtagctggaattaaaggcgcccaccaccacgctaatttttatatttttagtagagatggggtttcaccatattggccaggctggtctcgaacccctgacctcagatgatccgcccacctcagcatcccaaagtgttgggattaaaggtgtgagccactgcacccggccaacatccaaagctctatcttttaattgatgtatctgaaccattgacattcaatgtaattaatgatataattggattactgtctgcaaaatttgcttctgctttctatatgttgcccttgctctttttccctgtttttgtcttccactcttttttttttttccccttttctggtcttaattgggcatttatatgatttcatttttttctcctttcttagcatattagttatacttcttttttctttttactttttttagtgattgccttagagtttgcaacatacatttacagctaattaaaacctacttttaaataatactataccacttcaccagtggtgtgagtaccttgtaataaaataatcctaattctggctcatgcctgtaatcccagcactttgagaggctgaggtgggtggatcacctgaggtcaggagttcgagacaagcctggccaacatggcgaaccccatctctattaaaaatacaaaaatcagccaggtgtggtggcatgcacctgtcattccagctactggggaggctgagggaagagaatcacttaaacctgagaggtggaggttgcagctagccgagcccatgccacagcactccagcctgggcagcaaagtgagacttcgtctcaaaaaaaaaaaaaaggatcctaattcttccttcctgtcctttctatcattgctgtcattccttatacttctatataaatacatataaacatacacacacacgaggtatacacagaaatctacatggtcaaatacaattgttgctattattttgaatgaactgttatctgatagaacaatcaagaataagaaaaatagaagttttcggccaggcgcggtggctcacgcctgtaatcccagcactttgggaagctgaggtgggcggatcacctgaggtcaggagttcgagaccaacctgggcaacatggtgaaaccccgtctctaataaatatacacaaaaattagccaggcatggtggcgggtgccaatagtcccagctcttcaggaggctgaggcaggcaagttccttgaacccggaggcagaggttgcagtgagccgagatcataccactgcactccagcctgggcaacagagtgagactccatctcaaaaaaaaaaaaaaggaaaaatagaagttttcattttacttttatttattccttgttcagtgtacttcctttctttatgtagagctgactttctaacctatatttttttctttgtctctaaacaccttttttagtatggtggctaacacctgtaatcccagtactttaggaggctgaggcagaccagattgcttgaggccaggagttcgagaccagcctggccaacatggtgaaaccccttctgtaataaaaatacaaaaattagccaagtgtggtggtgcacacctgtaatcccagctacttgggaggctgagacacaagaatcacttgcaactgggaagcagaagttgcagtgagccaaaatcacgccagtgcactccagcctgggtgacagaatgagagactctgtctcaaaagaaagaaagaaggagagaaagagagacagagagagagagaggaagggagggagggagggagacagggaaagactatttcttgcgaggcagacctactgacaacaaattaccccaatttttctttgtctgagaaagtctttttccttcacttttaaaggacaattttgcagaattctaggtgttggtattttcctctcactttaaatatttcactctactttcttcttgcttatgtgggttcagagtagaagttggatgtaattcttatctttgatcccttatagatagttgttttttccctctggcttctttcagaattttttccttatcttttattttttgtagcttgaaaaatgatatgcctggtataggcttttggtggatttttctgtctttttgttttttgtttgggatttatcctgcttggtgttctctaagtttcctagatctgtgatttggtgtctgacattgatttggggaaattctcagtcattattgtttcaaatatttcttctgtttcttttttctttctagtgttcgcagtatgcgtatgtgacatcttttataactgttccacagttcttgtatatgctgttctgcttttttccagtctttgttctggttaactagcttctcctgagagcaaatcttcttaagaagagcagagtgctctgaggaatttcaaatttgttctttctccccacccctgcaggaagcatgaaggggttttctttactaatattctctggtatatatttaccatgagaacctggttctgctcctagaggtaacactcacaaaagtgtggggacccccctcccctccccatgactctggagtttttaactctcagacttttccacaatcagcctctggcaaataatcaattacagttcaggatttccttccctggcactggttccagtgcaggtttttgccccagtatattgtgattctctgtattcacctacctatttgtctctccagttgtggggggcaacattttaccttgtgacctccctttttttttttttttttgagacggagtctccctctgtcgcccaggctggagtgcagtggcgcgatctcggctcactgcaagctccgcctcccgggttcacgccattctcctgcctcagcctcccgagtagctgggactacaggcgcccgctaccacgcccggctaattttttgtatttttagtagagacggggtttcaccgtgttagccaggatggtctcgatctcctgacctcgtgatccgccctcctcggcctcccaaagtgctgggattacaggcgtgagccaccgcgcccggccttttttttttttttttttttaacagatctaagaagagttgttgatgtttcagtttgctcagcttttacctactctgggatatttaaaagaacatcccaacctacaaaatgaataaatccaatttcttatacatgaaataatcagactgggcacagtggcccacgtctgtaatcccagcactttgggaggctgaggcaggcagatcacttgaggtcaggagttcgagaccatcctgaccaacatggggaaacctcgtctctactaaaaatacaaaaattagctgagcatgggggcacttgcctgtaattgcagctactcgggaggctgaggcaggagaattgcttgaacacgggagacgaatgttgcagtgagccgagattgcacaacaccactccagcctgggcgacagagtgagactccatctcaaaaaaaaaaaaaaaaaaaaaaaaaagaattgatatagcaaacttcgctattgttttatttcaagaaattgccacagccactctaacattcaggaactggcaccctaatcagtaagcagccatcaacactgtggcaggactgtccaccggtaaaaaattacaacttgcttttaaattaagatatgtacatttttaaagacataatgcttttgtacacttaaaagactacagcatagtataagcacaactttttttttttttttttttttttttttttttgagacagagtttcactcttgttgcccaggctggagtgcaatggtgtgatcttggctcactgcaacctctgcctcccaggttcaagtgattctcctgtctcagccttctgagtagctgggattacaagcgcccgccaccatgcccagctaatttttgtatttttagtagagacggggttttgccatgttggccagcctggttttgaactcctgacctcaggtaatccacccgccttggcttcccaaagtgctgggattacagacgtgagccactgcgcctggcccaaagcataacttttatatgcactggaaaactaaaaaaaatgtggacatagtgagactccgtctcaaaaaaaaaaaaagtgactttttaaattgtgatattcattttattgcagtggtctggaaccatatccacaatatctctgtggtatgcctgtaatggaaaaagatattccatgcaaatagtaaccaaaagagagatgaaatggctgtactaatataaccaaatagaatgaagtaaacgactgctgcagaagatcaaaggggacattatataaagatatagggtgaattcaccaaggcataaaacaatgataaacatgtgcaccaaatattagagctgcaaaatatttgaaggaaacattgatagaagtgaagggagaaatagttctaaaataatagttggagtcttcaacaccactttcaataatggatagaacaaccagagagaatattaataagaaaacagaggacttgaacaagtaataaaccaagtagaacaaataagtcatattcgaaacactccacccaacaacagcaggatagaattttttatcaagcgtacatggaactttctccaggatacacaatgtgtagaccacaaagcaattcttaatgagttttaaaagattaaagtcatacaaaatgtattttcagatcacagtagaataaagctagaaatcaataacagaaggaaagctggaaatgtagaaatatatgaaaattaaacaatacaattttaaacaaccagtaggtcaaggaataaatcacaagggaacttataaaataccaagaagcaaatgaaaataaaagcacaacataccaaaacttatggaatatggtgaaagcagtgccaagagagaaatttatagctaaaacctacatacattgaaaatgaagaaagatctcaaatcaataacttaattttacactttaaggaaaagcaaataaaacacaaatctagcagaagaaaggaaataataaagaccagaacaaagataaataaaatcaaaactagaaaaataagagaaaattagcaaaactgaaagttagctcttcaaaaagatcaatataattgacaaatgattagctaaattgatgaggtaaaaaaagagagaagactcaaattactaaaatcagaaataaaagtatatacattactaccaatttaaagaaataaaagagaatactatgaacatttgtatgtcaagaaattaaataactagacaaaatcctcacatttctagaaacacacaatctacaaagactgaatcgtgaagaaatagaaaatctgagtaaacctgtaactaataaggagattgatttggtaatccaaaatctcctaacaaagaaatgcctggaccacatttctttactgactgattctaccaaatattttaaagagaattaacaccgatctttctcaaacagttctaaaaatttgaagagaatggagtacttcctaactcactctatgaggccagcatcaacctaataccaaaaccagaaaacacactacaaaaaaggaacagacaagtattccttatgaatattgatgtcaaatcctcaataaaataatagcaaactggaatcagtggcatttttaaaaagattatatacctttaacaagtaaaatgtatccctaaaatacaagaatgattcaatatatgaagatgaaatgaatacacattaatagaccaaaaaaaatggtcatctcaattgatgtagaaaaagcatttggcaaaatccaatcctcttttgtgataaaaacatttaacaaagtaagaatagaaggaaactacctcaacatgataaaaaccattgctatgattttaacgatgatgtcccttcccaaattcatgttgaaacttaatccccagtgcaattataagaggtgtagctttttgaaggtgactaaatcactagggctctgtccacataaatgagattggcatccttataaaagggctgaagtatgaagggagcactctcttgcctttccaccttccaggatgtgaggatacagcaacaggatgctatcttggagagagcagccctcaccagacaccagtggtggtgctttgatcttggacttcctagctccagaactgtaaaaaataaatttctattctttataaagtgcccagtctaaggtattttgttatagcagcacaaatggactaagacagccatatatggaaaatctacgactaacatcactggagaattattgaaaacttttcccctaagatcagcaataaaacaaggatacccacttttggcaactttttttttttttttgagacttaaaagagtcaaactctgctgttgcacaggctggagtgcagtggtgcaatcttggaactgcaacctccacctcccgtgttcaagtgattctcctgcctcagcctcccaagtagccgggatcataggctgcatcaccacacccagctaatttttgtattttcagtagagatggggtttcacgatgttggccaggctggtctcgaactcctgacctcaggtgatcgacctgccttggactcccaaagtgctgggattagaggcgtaagccaccgtgcccggccacacttttgccatgtctatttaacatcgtactgaaagttctagccagagcaattaggcaaggaaaataaatgaggcatccggcagggctcggtggctcatacctgttatcccagcactttgggaggctgaggcaggtggatcacgaggtcaggagtttgagaccagcctggccaaaacagagaaaccccgtctctactaaaaataacaaaaattagttgggcatggtgacgggcacctgtaatcctagctactctggaagctgaggcaggagaatcgtttgaactcaggaggcggaggttgcagtgagccgagatcatgccattgcactccagcctgggcgacagggcaagactccatttaaaaaaaaaaattaggcatccaattggaaaggaagaaatgaaatcatttctgtttgaagattacttgatcttatatgtagaaaactctaaagattggtttcattaaaagaaacttttagagctaaacaacccattcagggccgggcacggtggctcacacctgtaatcccaacactctgggaggccaaggtgggagaatcacttgaggtcaggaggtggagaccagcctgggcaacatggtgaaaccctgtctctactaaaaatacaaaaattagccaggcatggtggtgcacacctgtaatcccagctacttgggaggctgatgcaggagaatcccttgaacccaagaggcagaggttgcagtgagccgagatcatgccactgtagtccagcctgggtgacagagtgatactccatctaaaaaaaaaaaaaaaaaaaaggccaggcgctgtggctcatgcttgtaatcctagcactttgggaggccaacgttggcggatcacctgaggtcaggaattcaagaccagcctggccaacatggcaaaaacccatctctaccaaaaatacaaaaattagccagatatggtggcaggcacctgtaatcccagctacttgggatgctgagacaagagaatcacttgaacccaggaggcagaggttgcagtgagctgagatttcaccactgcactccagcttgggtgactgagtgagactccatctcaaaaaaaaattctacttacaacaacatcaaaaataatagaatatttagaaattaacacaggaagcaaaagactttacgtagaaaactatacaacgtttctgaaagaaatttgaaaagacattattaaatgtaaagtcatctctaattaaagacttaatattgacaacatgacgatatcatccaaagctatctacattctgcataatctccatctccatcaaaatccaacatgattgtttttcataaaaagaaaacccattataaaatcgataaggaatatcaagtgacccttaattgccaaaacaatctttttttttttttttttttaagatggagtctcgctctgtcacccaggctggagtgcagtagcgcaatcttggctcactgcaagctccgcctcctgggttcaagtgattctcatgcctcagcctcctgggtaactgggactacaggcatgcaccaccatgcccagctaatttttgtagttttagtagagacagaccatgttgatcaggctggtctcgaactcctgacctcaagtggtccacctgcctcagcctcccaaagtgctgggattacaggagtccgccatcacgcccagcctccaaaacaatcttaaaaagaacaaagttggaggattcatgcttttttgttgcaaaacttactacaaagctgtcgtaatcaaaacagtgtggttctgactggcaataaggacagacatataggccattacaagacaataaagtgtagaaataaacctatacatgattaattgattttcaacaagggtgctaagatcattcaattgggaaaggacagtcttttcaaattttcagggagaaaattgtatatctaaatgcaaaagaatgaagttggaccttaccttatacaatacacacaaattaactcaaagtggatcaaagacctaaacaaagagttaaagctacaaaactgttagaagaaaacacagggaaaaagcctcatggcattcaatttaacaataatttctggtggaatttggctgtgaatccatctggtcctggactttttttggttggtaagctattaattattgcctcaatttcagaacctgtgattggtttattcagggattcaacttcttcctggtttagtcttgagagggtgtatgtgtcgaagaatttatccatttcttctagattttctagtttatttccgtacaggtgtttatagtattctctgatggtagtttgtatttctgtggtattggtggtggtatcccctttatcattttttaatgcatctatttgattcttctctcttttcctctttattagtcttgctagtggtctatcaattttgttgatcttttcaaaaaaccagctcctggattcattaattttttgaagggtttttttgtgtctctatttccttcagttctgctctgatcttagttattttttgccttctgcttgcttttgaatgtgtttgctcttgcttctctagttctttaattgtgatgttagggtgtcaattttagatctctcctgctttctcttgtgggcatttagtgctataaatttccctctacacactgctttaaatgtgtcccagagattctggtatgttgtgtctttgttctcattggtttcaaagaacatctttatttcacagccgaattctaccagaggtacaaagaggagctggttccattccttctgaaactattccaatcaatagaaaaagaggcaatcctccctaattcattttatgaggccaacatcatcctgataccaaagcctgggagagacacaacaaaaaaagagaattttagaccaatatccctaatgaacatctatgcgaaaatcctcaataaaatactggcaaaccaaatccagcagcacatcaaaaagcttatccaccacgatcaagttggcttcatccctgggatgcaagactggttcaacatatgcagatcaataaatgtaatccagcatataaacagaaccaaagacaaaaaccacatgattatctcaatagacgcagaacaggcctttaacaaaattcaacagcccttcatgcttaaaactctcaataaattaggtattgatgggacatatctcaaaataataagagctatttatgacaaacccacagccaatatcatactgaatgggcaaaaactggaagcattccctttgaaaactgacacaagacagggatgccctctctcaccactgctattcaacatagtgttggaagttctggccagggcaatcaggcaggagaaagaaataaaaggtattcaactaggaaaagaggaagtcaaattgtccctgtttgcagatgacatgattgtacatttagaaaaccccatcgtctcagccgaaaatctccttaagctgataagcaacttcagcaaagtctcaggatacaaaatcaatgtgcaaaaatcacaagcattcctaacaccaataacagacaaacagagagccaaatcatgagtgaactcccatttacaactgcttcaaagagaataaaatacctaggaatccagcttacaatggatgtgaaggacctcttcaaggagaactacaaattactgctcagtgaaataaaagagttcacaaacaaatggaataacattccatgctcatggataggaagactcaatattgtgagaatggccatactgccccaggtaatttataggttcaatgccatccccatcaagctaccaatgactttcttcacagaattggaaaaaactactttaaagttcatatggaaccaaaaaagaacccacattgccacatcaatcctaagccaaaagagcaaagctggaagcatcacactacctgacttcaaactatactacaaggctgcagtaaccaaaacagcatggtactggtaccaaaacagagatatagaccaatggaacagaatagagccctcggaaataataccacacatctacaaccatctgatctttgacaaacctgacaaaaacaagaaatggggaaaggatttcgtatttaataaatggtgctgggaaaactggctagccgtatgtagaaagctgaaactggatcccttccttacaccttatgcaaaaattaattcaagatggtttaaagacttaaatgttagacttaaaaccataaaaactctagaagaaaacctaggcaataccattcaggccataggcatgggcaaggacttcatgactaaaacaccaaaagcaatggcaacaaaagccaaaattgacaaatgggatctaattaaactaaagagcttctgcacagcaaaagaaactaccatcagagtgaacaggcaacctacagaatgggagaaaatttttacaatctacccatctgacaaagggttaatatccagaatctacaaagaacttaaacaaatttacaagaaaaaatcaaacaaccccatcaaaaagtgggcaaaggatatgaacagacacttctcaaaagaagacatttatgcagccaacagacacatgaaaaaatgctcatcatcactggccatcagagaaatgcaaatcaaaaccacaatgagatatcatctcacaccagttagaatggcaatcattaaaaagtcaggaaataacaggtgttggagagtatgtggagaaatagaaacactttttacactgttggtgggactgtaaactagttcaaccattgtggaagacagtgtggcgattcctcagggatctagaactagaaataccatttgacccagccatcgcattactgggcatatacccaaaggattataaatcatgctgctatgctgctataaagacatatgcacatgtatgtttatagcagcgctattcacaatagcaaagacttggaaccaacccaaatgtccatcaatgatagactggattaagaaaatgtggcacatatacaccatggaatactatgcagccataaaaaaaggatgagttcatgtcctttgtagagacatggatgaagctagaaaccatcattctgagcaaactatcacaaggatggaaaaccaaacaccacatgttctcttgtaggtgggaattgagcaatgagaacacttggacagggtggggaacatcacacagtggggcctgtcgtggggtgggggtactggggagggatggcattaggagatatacctaatgtaaatgacgagttaaggggtgcagcacaccaacatggcacatgtgtacatttgtaacaaacctgcctgttgtgcacatgtaccctagaacttaaagtaaaatttaaaaaaagaaaaaaaaaacaataatttcttcagtatgacaccaaaagcacagacaataaaaggaaaaaacaaataaattggactttatcaaaattaaaaccttttgtatacataaggattctatcagtagagtgaaaatgcaacctatggtatgggaaaaaatatttgcaagtcatatgtctgataagaggttaatatccagaatatataaagaatgcctacaacttaacaacaaaaaatcaagcaattcaatttaaaaaacaaaaggctgggtgtggtggctcacacctgtaatcccaggactttgggaggccgaggtgggcagatcacctgaggtcgggagtttgagaccagcctgaccaacatggagaaaccccgtctctactaaaaacacaaaattagctgggtgtggtggcacatgcctgtaatcccagctacttgggaggctgaggcaggagaatcacttgaaccccaggagacggaggttgcagtgagccaagattgtgccattgcactccagcctgggcaacaacaacaaaactccgcctcaaaacaaaaagcaaaagactcaaactttctgtaactaagatatatgaatagccaataagcaaatgaaaagatgttcaatatccactaaccattagggaaatgcaaataaaaacctcaatgtgataccatttcacacttgttgggataactactattagacaaacaagaagatgaaagaaaaagaaaatagcgttggcaagtgtattagtctgttcttgcactgctataaataaatacctgagactgggtaatttatgaagaaaagaggtttaattgactcatggttctgcgggctgtacaggaagcatagcagcatctgcttctggggaggcctcaggaaactcacaatcatgacagaaggtgaaggggaagcaagcatgtctttcatggctggagcaggaggaagagaggaagtggggtggtgctacacacttttaaacaaccagatctcatgagaacttactcactatacagtaccaagtggggatggtgctgagccattgatgagaactccaccccaataatccagtcacctcccaccaagccccacctccaacactggggattacaattagacatgagatttgggcagggacacagacctaaaccatatcagcaaggatatctagaaattagaacccttgtgccttgctggtgggaatgtaaaatgatacaccctctgtggaaaacaggagggcagttccttaaaaagttagatatggaatttccttatgatctagcaattccactcccgggtttacatcccaatgaacccataggggaaaaaaagttgacaatatcatatattgaaaatgagtttttgactttttttttcttttgagacagagtctcactctgtcgcccaggctggagtgcagtggtgttatctgggctcactgtaacctccacctcccgggttcaagcgattctcctgcctcaggctcctaagtagctggaattacaactgtgtgccaccatgcccggctaatttttgtatttttaatagagacagggcttcaccatgttggccaggctggtctcaaacccctgacctcaagtgatctgcccgcctctggctcccaaagttctgggattgcaggcatgagccactgcgcccggaatttgttttgtctttctgagatggagtcacccaggctgaagtgcagtggtgcgatctcagctcactgcaacctccacctcccaggttccagggattctcctacctcagcctcccgggtagctgggattacaggcacgctccatcatgcctggctactttttgtatttttaatagagacggggtttcaccatgttggccaggctggtctcgaactcctgacctcaggtgatctgcctgcctcagcctcccaaagtgttagaattataggcatgagccaccatgcctggccagagtttttgacttttggtattttcaacttatgatggatttatctggacacaaccccatcataagttgagaagcatactgaatgtctatcacttccgcaccattgtaaagtggaaaaatcataagtcaagccatcataactctggaattgtctgtatatctgaaaaaattgaaagcaaggatcagaatctggcacaccaacattcacagcagcattattcacaattgccaaaaggtagaaacatctcaaatgtccatcagcagatgaatggatgaacaaaatgttgtatatacatacaatggaatattattaagccttaaagaggaaggaagttctgacatgtgctacaacataaatgaacctcaaaggcattattgctaagtgaaataagtcacacacaaaaggacaaatattgcataattccacttatacgaggcatctaacataggcaaattcacagaggcagaaagtagaatagcgcttaccaggggctagagggaggggaaatagggagttacgttttaatggacacagtttctgtttggatagatgaaaaagttatggagatgaatagtgatgctggttgcacaacagtgcaggtgtacttaatgcccctgagttgtacgcttaaacgtggtttacctagtaaattttatgctatgtgtattttacacaactttaaaaagatgaactatgagttaaaagcattgggtaaataagtagaatttcaaaaaagcatttaaaaaattgtttccaagtgtacttttccagagtagactagataccattgaagtaagagagacccatcgattagaaaagagataggaaggcaaatgaaattaaaatgaccagagtttaaaaaggattagacagaaagtaataaatgtgacaggcaggcacaggagatccaataggcacataattcatgtccctgaaggagaaatttgaatagaacagaaaatgtatttacagatgtaatttaaaaaattttccagagttaaaagtatgaatctaaaaattgaatgggtacctcgtgtccaaggaaaatagactcaaaaatatattcttgtaaagttattggacttcaaagataaagaaagtatgctttaagcaactatgcaaagtaattaactaaaaggagaaaattagaccggcctccaagttgccacagctatatttgatatttgaggacagatgggtaaagtctatatagtcttcatgcaaagaaagtgtgacccaagaaatttttactcagctgaactgtacttcagggacaaagacaacacaaacatgtttttttaatgtgcaagaattcaggaaatatagtttctacaacactttttaaaagattctaatagagggtagatggagaaaagacacagaaaggactggtgatgaccatcaaatccatttaaagatgcaactaagatgaaaacaagcatggcaattatggttaaagaacaaaatgtaggccaggcgtggtggctcacgcctgtaatcccagcactttgggaggctgaggcaggtggatcacatgaggtcaggagttcgagaccagcctggccaaaatggagaaagcccatctctactaaaaatacaaaaattagctgggcatggtgacaagcctgtaatcccagctacttgggaggctgaggcaggagaatcacttgaatctgggagatggaggttgcagtaagttgagattgagccactgcactccagcctgggtgacagagtgagaccatgtctcagaaaaaaaaaaaaagagcaaaatatatatgttataaactctgacagtgaaggagtgatataaccaacaaaagttgaatgagaaagagcagaagataggaaataggtcaagtatgctggtgatatagtttggctctgtgtccccacccaaatatcatgttgaattgtagtccccattgttggaggtggagcctcatgaggggtaatttgatcatgggggtggtttctaatggtttagcaccatcctccaagtgctgcctcatagtagagttctcacaagatctggttgtttgaaagtgtgtaacacctcccctttctctctctctctctccctctgctgccagccacgtgaagatgtacttgcttctccttcacctcctgccatgattgtaagtttcctgaggcctccccaagcatgcttcctgtacagcctgtggaactgtaagtcagttaaacctcttttctttataaactacccaggctcaggtagttctttatagcaatgtcaaaacaaactaatacagctggtttcctgaatgtttagagctggtgaccagaatatattatttaaagatggtaaatcaagcacagaggtctaaatatatttaaaggcataaaggtaaagcttaaaaacaatctaatccctaagttgggcggtatgaagagaggatatatgctgattccatcatgtttatggaaaggagtgaaaaaggccgggcacggtggttcgcacatgtaatccatgcactttgggaggctgaggcaggtggatcacttgaggtcaggagttcaagaccagcctggccaacatggtgaaaccctctatctgctaaaaatacaaaaattagccgggcttggtggcatgcacctgcacttccagctactcgggaggttgaggtgggataatcacttgaatccaggaggcagaagttgcagtgagccaagatcgtgccactgcactccagcctggatgagtgagatcctgtctcaaaaaagaaagaaaagaaaagaaggaaggaaaggaaagaaaggaaagaaagaaaggagttaaaaaaatactctcaggaagatcctaggaaaaagtgcaaaccatgacaagagcatctaactgtattgcaaacatatgaaacgatatcactgaaggggtggagggcaaaggtgctgatttggtaactttggagtaaatgaggtctataaagccaaaagcaataggaactgcaaaaaagcatggtactctagtaggtaaagttgtttcccacaaaaaaaaaatgacatataattatgaggtaaacaattctgaaactgctatacatgtacactggaatcaaacaattgcgcaagtggatggtggaaaatgggagcctgaattctcactgatggagtaggaatttaccaataaaaaaaggaggttagaataatccatctggtaatggactagagttgcagacatcagcaatatctcacattttagtcaatatagattcaggtgattacatatagaaatatttgcagatatgtaacatacacagataagtatacacacatatatttatgtgctttgtcagctgagagggcccaaaagaaacaaagccccagtagcaataagcatgccaggacctatatcttggattccaatattattctacaataaaaagaaccttggattcttggagaaatggcagattctgagacttgggcaggaaatatacaagattagctcagaatattgtgcagtgtcagaaaatagacaagtgctaaacaagaaaaacacacattgatgagggtccgtcagagaagcagaggagctgaaagatctcccaacggccaaagcgggagccatctgagcaacaaaataaagtaatattggattataacccaaagtataaaataaatacccaccagtccacactgatagaaacaaatgattgaatcagttactaaatgggagagaagagacaaacctgtgcagaatttcagattacttatatagatactgcattgaattcatggtgattaattccagtaccagaagaaaaactggctgttttggagttcctgagaaaatatctattttcttcaacatgtcaccttcctaaaatgttttcaagggtagttttaactgtttttgactttttccttatgtgctgacttcagagcctcagcctgaagaaggtgggatttcgtggccttgtctgcctatagagcccactacagggccatacacaaggcaagccttcttgcttgcatttaaaatagtcataatggtgctttatgcggtgccatgtggtgtgatgtttctgtaatcatttagtgctgagactgataaatttatcagtcactggtgccagttcagctgacaccctccaccttcttcccaaacaaacctcctccttcccacctcctccttctctctcagccccaatgatgacaagcttctgatcattgcctgaagcctctgccttgacctattgcattcatgcccaccatcaagcccagtttaaacccgtgcctcctactgatacctcctgctagggtactagtgatttactattctttaagacagaagtgacccgaaacccagctctcccaggatagctgccaggacctggccatgattcaagcccaaataacataagccaaattacacactcagtgaggaaggcatttttttcaagtccccacccttgtgtgagtgaaggtggaacaaagattgtgtgaccatgttgttcaaacacaggaaaatgactgcattccctccccttagttttcatttgttgattcttctccaagccctgacttccaactgtacttcttttttgatgctgcctcttgcttagaggattctgaagggaaggacagggtagtatgctgttctaaagagtatgggactttatcctgtaggcatggggagccactgagcggtttttaaggtggtcagcttcctatttttgtctttggaggtaagttcactctgaaggccagccaatggcagggcaaggcacccactgtcctctccaggaaagcagtggccattctgggcacacctaagtcaatccaaagctgagaggggcaggaactgatgtgatcttaggatgccgagacactagaatatagccagatacacaaggttcagatgttctggccttacaagcaaattgtattaaatcagccatgcttcctaagcttcgtcccaccttggtaaacataaaaaataaggatatctgtacaactcactgggatcaacttgcgtgagcttggataattctaaaaggagcttcatggataataattatttacatttcctttatatggtactcttataaaaaagaaaaagaaaaacaaaaaaataaatgacatataattatgagaagaaaaataaaagcaaatcttggggtagatttaaatatcaactttgggtaaaatttcctgataacattcttcttggagtctcttttaaatatcaagttttgtgttaaaaatagttcctgatcattgctcctgcacatagttcttgatcaagattttttttttttttttttttttttgagatggagtctcactctgtcacccaggctggagtgcagtggtttgatctcggctcactgcaacctccacctcccgggctcaagtgattctcttgcctcagtctcccaagtagctgggattacaggcacccaccaccacacctggctaatttttgtatttttagtagagacggggtttcatcatgttggccaggctggtctcgaatccctgacctcaagtgatccaccctccttggcctcccaaagtgctaggattaaaggtgtgagccaccacgcctggctgatcaaaatctttttaaatgatcatctctttaatttttgatagttaccatggagaaaaaacttttttttttttttttttgagttgaagtctcactctgtcaccgaggctggagtgcagtggctcactgcaacctctgcctctcgggttcaagcaattctcctgcctcagcctcccaagtagctgggattacaggcatgcgctgccacatttggcgaatttttgtattttcagtagagacggggtttcaccatattggccaggctgttctcgaactcctgacctcaagtgatccacctgccttggcctcccaaagtgcctggaatacaggcatgaaccaccgttcccagccaaaaagctatttgatacaagaagtgatgataaaatgtaaagccatcggctatgaaccaatgggaaaaaaaagaaaaaaacacacaataaaaaatcaaaaggaaataaagacaataaaagaaacaaaaaagagccattttttttctgttcgtatagttatgtaagattttgtatagaagtgtatcatgcatgtatgtgtgaccacacagccttggtgtgccactggaccaattttcacaaacacccagtaccagcacccagtactagagttctagatcagcctagccaacatggtgaaaccccatctctactaaaaatacaaaaattagtgcagcctggtggctcaggcctgtaaccccaactactccagaggctgagatacaagaatcgcttgaatctgggaggcaaaggttgcagtgagatcaccccacagcactccagcctgggcgacggagtgagaccctgtctcaattaaaaagaagaaaagaaaagaaaaagaaaaaaatagttgcttctcagtttgatgatatgcagtcactctcacaaatcagtaatttatgcgacaataatcacggaaaatatactgcttaggcttataaatatttaaacagataaacatacttttttttttttgcaagacctccctcagtcccccaacccacttttttatttgacacagttaataataaatgatttcttaaaagtagaatacttttttttttgcttctagtatcctgaaaataaagaaaagagtacatttcaagaaaacaagttgaaaaattagtcacaataaaatgaaaggcgattgatctaattccctgatgtacactctaaggacatacagctctgttgaaggctcactgatttacaggggaaaatatctaggatataccacgaataaaaagaagtctaatataatttttaaagagaaatatgcaaatacaccctgaactgaatttcttctcaaagttcattacagcaagaactccattttccaattcagtggtacattctctctaggctgcaaaaaatgctgtggacaaaatgacatttggaaaaggtatctttaaagatacctttaagagcaatagtccccttatgccatttacgctcacataagagactggaatagcaaagcactatgaacagtaatgaatgttgtaaaactccctggtgaggcttaatcaatactgcctatagccgtgtccaccggaagaagctcgttctctgtgaattctagtgggaaagaatgattgaatgatgaacacgttttcactggttgctctatcagatacttaaaagtttctgggaggccttgccttttttacccgaggaagaagtgaaaatgcgtcttgcacaattgcttaactattcccaacgcaagacttctttatatcatttatttcccttgtattactggcgcggaaacttgggtgtaaaagtgatcacaaagattacatggggccaggcgcggtggctcacgcctgtaatcctctcgggaggctgaggcaggagaatcgcttgaatccggtaaggttgcagtgagccgagatcgcgccactgcactccagcctgggcgatagacagagactctgtatcaaaattataataataataataataataatccgagcctgaccagtcgccccacagcgtcaaggtgaaaccaggtgaccgcgactacagcgtttaataatgggtcctcaggcaaaaactccacggatgggaaccccgcgcctctgaagctgcctaacgaggcggtctcctggtggcgcctgccccgccaaaggagcaatgagggggctgcgtttaggcgaagccggtattgggcgaagcttctggatcagtcaggggctcagaagggacgtctgtgggagaggggtcagcacggtatccagaccccgcccggggtgaggttggtactgaactgactgaggggcatggaacccccaccctccaccctggtaaggtgccggggccagtttgggccgggactcctagaatttgaatcgggggtggtctaacgctgtcgcctgcggggtgtgcaggaggcccctagtgaagccaagagttcgtagagcctgggcgccgctctatgctcggctctcgattgctcacgcctggcagcggcgagcggcgcacgcgacggctggggctctgcgctcgaggggtcgagcctgggcagtacaggcggcggtgcgcactctgcggcggcctctgcgcctcgggcgggcgggagagagaggccgcggccgccagcgtggggatgtctaggagctcgaaggtggtgctgggcctctcggtgctgctgacggcggccacagtggccggcgtacatgtgaagcagcagtgggaccagcaggtcggtgtcacgtgaccgtctcttccgggcccgcgcgcgcggcgtcgacctggggcctctcgtggtctctgcccgctcggttcctcagctcctcttcgtgtctttcccccgcggtggcgcggccctgcaccccacgcgtttgcggctgcggccggcggccgctctgctgggctccgggcgctgcagctcccggcgggcgtgtgcagcccgcagattcaggacgacccggctgcccggcttagcgcctttggagctccgcgctgaaggggccttgctccgcacaggcacggcacgcaagcttttggggtgcccagtggctctgttttcaagtcacagccggcccgcagggtgcggacctttccacatctcacttgggccgctagaaaatagaaggtggggaaggagtttcttggggtgcattctgcaagctaccagcctccctcctggcccaaggttggggttaaagcctaatgtgttttacgtgctattgattttatcccatggtaagggagccccccttccccgtactcactctccatgcctttgaccaagataatttggtgagatgtttgcacttctcgtttaaatgaacagtttgctatggaaactagaatctgggaacgatagagataacagtctccagatttttttttttggtacttttatttcaggaaatatccgtgacctgctgatcagcagtgactattctgtcctctcagttcatattttctttcttattcaagttgacagacctttaatgggtgattactgtgtggaagctacctcactaagcaccttgggaatacaaagataaggaaactccactcttccagagtctatcagtgattcacgaccttgctgagaacagggtcattggtgaattttcagaaaacaacttggcagtgattggggttgaacctagttcaccaagggtgaaaataatggactggatgaatcaagagtaaacagtcttttcttgatttgcctacccagacctttggactgtgctatgtgcttgatatacagagatgaagtggatgaggtctttgttcttggtgttcacagactgtggaaattagaagagaggaagcatgtgatggtacaagaattttgacgaggggttgagatgacttaacaatgaaagggcacaggagagatcagagatttgggattaaaatgtgctcctaaggggctggcttttggaatagaggcagaagacttccgcctcttacaaggaaaagtaaaagatgttgatcctgggaaaacttgagatggagtaaaatttagtatgacagatgatctgacgtcagtgaagtgatgtttgaagggtttgggtagggatggattagagcttggctttggaccctaactgaacatcaaatgttcccggaaagtttttacaatgtgactaaggcttggtccccaccccagaccatttaaaccagaatctcctggggatggggacctggttcaacaatgttttaaaagtaacccagagaattttaacacaggactaagcaccattgtgttacagagtggaaaagtggttatttggaagttagagctgaagaaccaaaataacgtgtgtgtgtgtgtgtgtgtgtgtgtgtgtgtgtgtgtgtgtttattttttttccttttatgtccggttcttcattaggggcttacattgtattaatagcagtgggaaagactaggacaaatgattagcacagtggatgtgtcggaaggttcaaggaagcaagaaattaaataatgaatattgattcctgaccgtctaccacataccaggcagtgtattaagcactttatgtatatcatctgtaatcctcacagtaacctagcaaaaattaagcagtgctacatgaggagccagagttctaggtgttagggttggaagaataaagaggtctttagtgattagtaaggaaagttgttagaaaggtagttcagtgagggtcacaggaaggatgtgtgaggcaatcagcatagaccttgaaacctagaggaagatagcaaatgatgggatggagagccagatcataagcacacgtgacatctctgagaaggaagggtaggatctgggaggcaggtgtggaaggaatgattctggtgaatggtgtgggcttgggagggtgggtatcggtgtgtcatggtgtaagaagcacaggacaggaagacctgcagttgggggagtggaataagcacctccgtttttgtctcagtggtgatcttgccaagggtgcatggttcaagacagttgtgtttcagttgagttatatcaatcccgggactccttcaaatccctcataatgaagctgtaggcctggaggaggtccagcaagtaggtattatattaggtgagtttttaaaaataggtaaaataatttggaaaaaaccccacaaacatacgcaggccctgggccccactcccattaattctactctatatagccactattaaaaaccatttattggccaggcacggtagctcatgcctgtaatcccagcactttgggaggctgaggcaggcagatcatttgaggtcaggagttcgagaccagcctggccaacgtggtgaaaccccgtctctactaaaaatacaaaaaaattagccaggcctggtggcgcacgcctgtaatctcagctactggggaggctgaggcacaagaatcgctttaactcagaaggtggagattgcagtgagctaagatcgtgccatggagccaagatctccagcctgggtgacagaacgagactccttctcaaaaaaaaaaaaaaaaaaccaataaaacaaaacaaaaaaaaccctatttatttattttgagatggggcttgttctgtcacccaggtgggagtgaagtggcacaatcttagctcactgcagcctgtgcctcccaggctgaggtgatcctatcacctcagcctccggagtagctgggaacacaggcacacaccaccactccctgcaatttttttttttttttttttttttatttttatttttgctagagatgggattttgccatgttgcccaggctggtctagaacttctgagctcaagcagtctgcctgccttggcctaagattacaggagtgctgggattacaggagtgagccaccacgcctggcctaaaacctttagagtattttgtgagcaataaactataaaatgttagttattagtaatgactgatgtttttaaaagtctcttcttgggtgccaggtccacgttctgaagtgctgtggttttttagtgcttactaaggtaactaccattgatgagcatttattttttccgctggtagtagcatccttctttttcttctttctctgttatataattaattaataattctgcatgatttttacattgttaactttacatgctagaagccaagttgagattttagtaatctgcattttttctgttggtgtttattgttcagctaggataagtgctaacagaagagtagtttagagtgttactgtagtaactcgccaagtttttaaagcattacatatcaattaaactttaaaaatttaacattggccgggtgcagtggctcacgcctgtaatccggcactttgggaggctgaggcaggtggattacttgagatcaggagttcgagaccagcttggctgacgtggtgaaaccccgtctctactaaaaatacaaaaattagctgggcatggtgatgcacgcctgtagtctcagctactcgggaggctgaggccggagaatcacttgaacccaggaggtggaggttgcggtgagctgcggagtgcagccactgcactccagcctgggcgacagagcgagactcttgtctcaaaaaataaataaaaaaaaatttaacatagtgccagttttttttttctgttatttcccattaaattttctgtactaaatgttcaggaatttcttaaaatatgataagaaatcatttcagtaataacatttagcacactaccaaatttatttgatcgtttattacattttacatttgtacagaaaattaaaatagtaactgggtatttggaatctgaaagttttaagtatattttggtaacactgttatttggatttgaatggcacaaggatggggaccacctgttcgggatgttactgaaatctgtttcttacgtttttagaggcttcgtgacggagttatcagagacattgagaggcaaattcggaaaaaagaaaacattcgtcttttgggagaacagattattttgactgagcaacttgaagcagaaagagagaagatgttattggcaaaaggatctcaaaaatcatgacttgaatgtgaaatatctgttggacagacaacacgagtttgtgtgtgtgtgttgatggagagtagcttagtagtatcttcatctttttttttggtcactgtccttttaaacttgatcaaataaaggacagtgggtcatataagttactgctttcagggtcccttatatctgaataaaggagtgtgggcagacactttttggaagagtctgtctgggtgatcctggtagaagccccattagggtcactgtccagtgcttagggttgttactgagaagcactgccgagcttgtgagaaggaagggatggatagtagcatccacctgagtagtctgatcagtcggcatgatgacgaagccacgagaacatcgacctcagaaggactggaggaaggtgaagtggagggagagacgctcctgatcgtcgaatccgaggatcaggcatcagtggacttatcgcacgaccagagtggggattccctcaacagtgatgaaggagacgtgtcttggatggaggagcagctgtcctacttctgtgacaagtgccaaaaatggataccagccagtaaggagcttctcaattcctttgatttgtcaattcctgtgtgaaggtttgtttttccaacctgtgaaagaaacgtgaatgtaaaagagacctaaataaaaggataattatatttattctctagttgatcagctataaatttatataaaacataggcatgtttgtactaatgaaacgtactgtcaacctctatcacattgttaaattaacacttttggtggtaactcaataaaattgagaaaattggaaatcctgtgttacttaaagaattagccatatttttctaacaaggtcacagagatttagggccaaattccagtcccagtgttgaattcatgttcaagtttataaaaattactttgttaatatttaacttacgtggagaactcctgctattgtatactgaaaagaggttagaattagcagattgaaggtgttttttgccctttttctaggaccagtctttttttccattttcctttttttctgctggcaagagatacctcatacacactccctgattgcctcaatcttgagattttcttttctttcttttttttttttgagatggagttttgcttttgttgcccaggctagagtgcaatggcatgatctcggctcctgggttcaagcgattctcctgcctcagcctcccaagtagctgggattatagtgtttgccagcacacctggctaatttttttttttattttattttttttttttgagacggagttttcctcttattgcccaggctggagtgcaatggcatgatcttggctcactgcaacctccgtctcccaggttcaagtgattctcctgcctcggcctcccgagtagctgggattacaggcatgcgccaccatgcccggccaattttgtatttttagtagagatgaggtttcttctccatgttggtcaggctggtctcaaactcccaacctcaggtgatccatccgcctcggcctcccaaagtgctgggattacaggcatgtgctactgtgctcggccctgatcttgagattttcaatggccagcttcctggcacctgaggagtatggcttgccagccatcatatggtttataccgaaacaggattttcccattaggcaagagactagtaaagatataggtacttgaggaatgcctttgtgtaatataatttgtaaccaagtcagagaaatacatatataactgtgaagagggtcattttctggcatgtggaaatgtttttcttaaaatgggttcaacttcaaatttagtcactgttaacaaattaatagtaacattttcacaggaaatgcagaatttactagttagctggtttttgcttctgagcggtctctgttattgatttcaggttctgcctgaattctcagtggctttccctttgtcctgttgaggacaaattttaagctaccctttgtggtcaggaccctgctaactgtagtttctttgattcccacacaactttgcagttagggtgaacttattcttcacaaacaattcttatccttagggctttgcacagtttttttcttctggaatatgcatctccacagcctccattctccctatacacaaagagaccccttttcacctggccaatttctaatcctaagcctccccctaatataggttgggcctccttttatttaccctcacactgccctgtggtacacagcacattccattccttatgtgtcacagagcatcagcatcacctgagggactaagaaatgtaactcctaggctctgcttcagaaattgatgcattttatctgggctagaatcaagcatatttagaaaaccaagaacaacttgggtgattccaatgcactgtgagcatggagaaccactgtgttgttgtgatcacctgttttctatgcagccctcagggaagtgcaaacctgtgagatcaggcaccattatctgtcttggactttgtattcccagttcctagcccagtgcctggtatgcagagggagctcatattttttgaaagaatgtgtgaagagacctgcctctgggagtcaggaatgtgacaattgggaaatccagcaacaatacctgcttttccagtacctttctcctaaaagttactggatcctacagatcttagtgggcgtatacttggtgttagaagaatagaaatctttctaattcccttccttttccccattttgcaattgtgggttggctgaagaaaagaagacaacatgggaaaggaaaatctgggtgataaacggattaaacctttaggttaccgctgctctagataaacccatgatgtgactttttgtttttctcctaggtcagctgagggaacagctcagttaccttaagggtgataatttttttaggtttacttgttcggattgctcagcagatggcaaggagcagtatgaaaggctgaagctgacatggcagcaagtgagtaaaaagcccttccccaaatccatgagggtggttcccccaggagtttgttggaacgaatatctagaaacttagggatgagcttttgagttgtttggaggggcactttttatttcgcaatgaaattagataccgaatatgtggagaagggagtgaaaaatactcgctgtaatcccagcactctgggaggccaaggcgggcagatcacctgaggtcaggacttcgagaccagcctggccaacatggtgaaaccccatttccattgaaaatacaaaaattagctggctatggtggtgggcccctgtaatcccaactacctgggagactgaggcaggagaatcgcttgaacctgggaggcggaggctgcagtgagcccacaccgtgccactgtactccagcttgggcgacaaagtgtgactccttttcaaaaaaaaaaaaatatattcactgctgacttggtgaattgggcttgagaggcttgagaatctcatgatttcttttatatgtgataccaagctctgattataattgaaaatgaaattctcattttcctggcagccattttaagaacaataaaactatttttttaaagtggaaagatggctatgttgaaaatagatttggaagaaggaaggtgactgattgcaaaaaccaacataacccagcttttctgcatttgaactcggagatgtttgaatttttgtttgctgaaatacttgttcctttttaactgtctctaatatcagcaccctaatctaagtcagctgtatcctaaacaatagctttttgctgatctccaggttgtattaaattgttttagttttgtttctatgtcaatatgttaatgtataatatgaataataaggcatcagtgtatactttttagttcaaaaaccagatgaaaccagacatggtggctcacatctgtaatcccagcactttgggaggcggaggcggccagatcacctgagctcaggagacaagcctgggcaacgtggtgaaaccccgactctataaaaaacaggccaggcgcggtggctcatgcctgtaatcccagcactttgggaggctgagggaggcagatcacctgaggtcgggagttcgagaccagcctgaccaacatggagaaacaccgtctctactaaaaatacaaaattagctgggtgcggtggcacatgcctgtaatcccagctacttgggaggctgaggcaggagaattgcttgaacccaggaggcggaggttgcagtgagccgagatcgcgccactgcactacagcctaggcaacaagagtgaaagtccatctcaaaaaaaaccaaaaaaacaaaacaatacaaaaattagctgaatgtggtggtggtgcactcctgtggtcccagcttctcaggagactgatgtgggagggttgcttgagcctgggaggttgaggctgcaatgagctgtgatcgagccactgtactccagcctgggtggtgacagagtgagaccccatctcaaaaaaaaaaaaattatatattacttagtttttatgttcattcattcattcaacagatactgagtacctgttatgaaccaggtgctgttctaggcctgagactactgtggtgaacgagacagctaaggcctctgccccaagacagctgacattctatacttaattttgataataaacagatcaacaagataattacccacagcactttttactttgaaggaaatagagtaatgagaaagattttaaattacaccattttagccacttatggtgttccttgtaaattgtagttgccttagcagccttcgtctattatcttaattatcagtgctttattaggacagctgatgaaatctgtcagtgttgaattaggaagccttttctttgacttgcctgaaaaaaatgtaagtagaaaatgaagagaagtttgtattgaggatagagccttatgaatattataactgggacatttttctcaagtgtacatgggatactgtgtgtaggcaagatcttattaatagattattgtgatatgtgcacacaggtagatttgtatttgtcctgcaagttgtttctcataaaagctgtaaaatggaagaagagcaaatatatgtaaattttcaaaaatgtgagttttctgtagtggttctttttaaaagaaaagctggcttttgcttattttgctcagagtatgtaatattggctcactttgcatatttatttattctttttaaaaaaaaattttaaatctttttgaggcacagtctcactctgttgctcaggctggagtgcagtggcacaatctcggctcactgcaacctccgcctcccaggttcaagcaatcctcctgcctcagcccctctagtagctgggattacaggcatgtgccaccatgcctggctaattttttgtatttttagtagagatggggttttgccatgttggccaggctggtctcgaactcctgacctcaggtgatccacccacctcggcatcccaaagtgctgggattacaggcgtgagccaccgtgcccggccactttgcatatttaattagactaacataacttgcagattattttttcacttccaaaatacgtattgatggtggatactaacctggtagggtgaagtgataacttaggttgcacatatgtggttcttagcaaacaactgaccagtatttctagttgcatctgaaaaagcccatctctcactgaagacctgaaagagaatcagttggtcttgaatggactccattgatgtagccacattcttagtatattgaaatgtgggttttccgtctttaaattttaaactttgaaagatttaccaaagaaatatgtagaaatgcttgtaacacaaatagcattttgtttgtattataaaatacttacagtaaagaggtctgatctcctgattaaaaagccccttcttgccacactccctttctgtgtcctctcctcttccttggtgactcctgtgaatagcagttccatacgtaggagaaactttatcaaacatttgggaaggatagggaagtttttgcattcttttcctggagactcattcttatggcacaagtaaagatactatgatcgatctttgcttgttatttttctagtgttcttcagcatatactgagtacctgccagctctgagctaggccctgtggatacattggtccacaagatcagcctcattactgatgagcttggtctggtaacatgagagcagaaaactaaactggggttcatttttttttgtttttttttttttgagatggagtttcactcttgttgcccaggctggagtgcaatggcgcgatcttggctcactgcaacctctgcctcctgcattcaaacgattctcctgcttcagcctcccgagtagctggaactacaggcgtgcgccaccatgcctggctaatttttgtatttttagtagagacggggtttcaccatgttggccaggctggtcttgaactcctgacctcacgtgattcacccacctcagcctcccaaagtgctgggattacaggcgtgagccaccatgcccggcctgggattcattcttttagatcataaattccaggagagaaggaaaaacaggtcctttatatattagtttatagtttgcctagtaaagattaagtgataatagaaaaagttattttcaagtaaatatgtaagctttttagggtcataaaatgtctcaattatacaaaaaagtcatagaaatactttatcactgagattatcagcaaatacatatttctgagatactcttctgagagtgggcaaagctcgttctatgattttcttaaattatttattgagcaataattattttttaaaattgtgatgaaatatgcataacatatagtttaccattttttagtgtacagtgcagtggaattaagtacattcacattgctgtgtaatcaccaccaccatccacctccagaatttttttatctttacaaaatgaaactccgtgcccattaaacactaacttcccatgaatattgattgtttaaaggaaggtgtttgttggctgatgtagaccagatgcagatataactggaagacattttttaaaatctgttcatggggttaattgtttttagactgtctgcaagtattgcaagtttaagaatgggggaaattgaaacttggttagtgaagggtcagaattactgggcccctttgagtggtgtagatattgctctttccgtaagactgctggggatttaatgctgtgaatacagatgttgggggcattaactgcaatttactacactccttacagctacaggatgctctttatagaaataaggattaggctgggcgcagtggctcacatctgtaatcccagcacttttggaggctgaggcgggcaggtcacttgaggtcaggagtttgaaaccctgtctctactgaaaatacaaaaattagccaggagtggtggtgcgcatctgagatcccagctacttgggaggctgaggcaggaaaattgcttgaacccaggaatcagaggttgcagtgagccgagatcgcaccatcacattccagcttgggcatcacagtgggactcttgtctcaaaaaaaccaaacaaacaaatacaaaaaaacatctatatgagtatctgagtatagatgcaaagaaaaatgtctgaaaggatgggattatttcttgatggtggatttcaagtgatttttacttccttcccatttggggccatgaattcctcatctgtaaaataagagtagattagattaggagtttgcatcctgagctctggggttgtcttggagcgctctgaaaatgggctgagtggctaggcctttcagttccctgtttcttctctaatgctgatttcatttgaaggaggggtttgacaggtaaaaatggctaagtcaccgagtagatagatggcatgtagcattatttttagttctgaaattctgagtcttgtttttgccatctaagagcttagagaaatatatacaagggtaattttcaagatatttgataaagggtagtgccgttggtcagaaaatgctggctggagtaggcacctggaggcctcctgctggccagaaggtaccccttgatttaggactacactgtgtagggtgcgggatccttgggacaatgcctgtttatcagctgattcaggggcatctctgttgtagccatcagttcagccacacattagccctgcatgtgtggcacctaaggattagatgcttagttctgcacataattaagtggattagtgataatctaacgaaagtaaaaaaggaagtaaattctaccctgggaatattccaagataccgtccgtcctttgttcgctctgttccccaccattcctactcagaatataaaacagaagaagcttttcccccctcaagattaacatccctaaccgtgctgttctcccacctcttgtttcaattgtgtttcaggtcgtcatgttggcaatgtacaacttgtctctggaaggaagtggacgtcaaggttatttcaggtggaaagaagatatctgtgcttttattgagaaacattggacttttttactagggaataggtaatgtgtttttaaaaaatcttatacttcaaggaatatgtaaagaatgaagtatacaggatttgagacagcctaatgtagacttgttagagatttattttaatttttttgagatagagtctcccaggctggagtgcagtggcatgaccatagctcactgcatcctcaacctcctgggctcaagtagtcctcctgcatcagcctcctgagtagctgggattacaggtgtgcaccaacatgcctggcttatttatttatttatttattttttggaggcagagtcttgctctctcccccaggctagagtgcagtggcgtgatctcggcacactgcaaccgccacctcccgggttcaagcgattctcctgccttagcctcctgagtagctgggattacaggcacctgccactatgcccagctaatttttgtatttttagtagagacggggtttcaccatgttggccaggctggtcttgaactcctgaccacaagtgatctgtctgcctcggcttcccaaagtgcttggattacaggcgtgagccactgcgcctggccttatatttttgtagagacaggggtctcgtgttgtctcaggctggttttgaactcctgggctcaaacagctctcctgccttagccttccaaagtgctgggattatggtgggtgtgaatcaccgttccttaccttgttagagatttagagtgtttacttgtggcaattacgaaaatttttgaattccagagaatatttttacttttttaagattaaaaaaaaaacttggctgggcgcagtggctcatgcctgtaatcccagcactttgggaggccgaggtgggtggatcacctgaggtcaggagttcaagaccagcctcgccaacatggtgaaaccccatctctactaaaatacaaaaattagctgggcgtggtggcaggcaactataatcccagctactgaggaggctgaggcaggagaattgcttgaacccaggaggtggaggttgcagtgagccaagattgcgccattgcactccagcctgggcaacagagtgagactccatctcaaaaaaaaaaaaaaaaagatgtttgtttcaactgaacatgacgttttttgaagaaattcttagaatgttaaaaaataagagttgtattacatgagactgttcaagagttggataagtcaatatttcacttgaggagatagggttattatattcttttaagctgtgtgtggtggggcatgcctgttgtcccagctactcaggagaccaaggttggaggatcactcgagcccaggagtttgaagccagcctggacagtatagtgagacccccatctcttagaaaacaccaaccaggctgggcccggtagctcaggcctgtaatcccagcattttgggaggccgaggcgagcagatcacctgaggtctggagttcgagaccagcctggccaacatggtgaaaccccatctctactaaaaatacagaaattagctgggcttggtggcgggtgcccgtaatcccagctactcgggaggctgaagcaggagaatcgcttgaacctgggaggcggaggttacagtgagctgagatggggccacttcactccagcctgggtgactcagcgagactccatctcaaacaaacaaacaaccaaccaaaaaaagaaccaaaacagagcagtgccttctaggaggacaagacaggaaaaataatggcagttactgactgcatctatttaggttgcccttagttaatagagttttgtattactagtatttgtttttaactctgtaaagtagacactcttttttatttttaactatttttcatagtgcttagcaaagtctgggcacatctgcatgtggcttgttcattggtcactgtgtttatcattgcgctttgagtttgctgctgtgtgctctccccagtggctgctttggtgcattagactcggggatgccgatgcacagaccttgcgaccatatattttcactaaatgtccacgtggatctatcaagacttttattgctcttgggtacttgtgagtttgctaccacactggtgaatttttgtttgagattctgattgttagttgctgtctgaagtcctgtgtgagattcatgaatcttacataatgaggttagtttagacatgacaaagtctttgatcacttcaggtcagggcagggagttcatgcctttcctcacttggggttcactgcagcctctgtttcttcagaagctgaggaatcacagctttgctcatgttactgagagtacgggagggtagtcagaaggagggtgacctgcaggctgctgtgagaaaatggaatagactccctacatttttgcaaaaggggttattttagttcttgagctatttattggtgctaagaaaagaatcgacactataactggttctttctcataaggaaaagaaatctgttgtttagtttaatgatttagcactatttatggaccttaatgtaccccatttataagggataagaaagggaaaaaactgataaaattggatcttggaatgttttcatgatcttcgagtgctgtcctatttagtgggttatctcctggaaaaaattagatttagattgcctgtttttaaaaatattgctggattttaacagaagttgtttaaatgcttcatttgttcatttctagagcatgttctgagaggaatcagctgagccttatttctttttaacatgccaatgaaaggcattaattactctccagtttctgtgtagtttatttagtgtgttggccatattggtatatcaccggaattattatttatttgatcttcctatttaaatcaagtcacctgaaaaatacattaattttaaaaagaaacttaacatcaccatggtaagtgggaaacctatataaattgtcataagtagaatgtaacaataaaaataaaacaatgctgttaaattgtagctggatcccatggcatataatggcaagccatggctttcttttccagtcaaaaagggaggctgctacaagtgttaatgagaatttaaagcagtaaactttcttttgatctaaccagaagaagcaaaagagaattagaaatcactttatgattcttgccacccggtttcatgctacagtgctgctcttcactttgggaactccacttgaaatatcagtgattggagaagtcccctgaaaccactacccctgggtagttaccacttgctcagacatttctgtgtatgaatgttaacaagattaccgtaccccagagaagctgtctgtaaagagcatttatatttaaggtacacttttttcatagctactaaagattttcattctgctatccataggacgtactttatttatttacttacttacttatttttttgagacggagtcctgctctgtcgtccaggctggagtgcagcggcgtgatctcggctcactgcaacctccgcctcccaggttcaagcaattctccggtctcagcctccggagtagctgctactgcattaagaactaaaattgaccagtattaaccgcagtctactgtctatgccttcccttggaaaccacaagcctttattagactccagagtcccaaaatagttccatcagtcagattctgccagtgcaactgctgtccaggcaggaaggcaaatgcttcctatctgccaccttcccagaatcctcgtaaagttgattgaagtgtagatactatgaatgtgtactatcatatttcatcaattctaagatccattaactttaagatacaccattttgtgtacaaataagagctaactaccaattaaattatgacatatcagtaactataagatgtatctagctgtcagagatgtcaaaatttgcaaaattacgtatcttaaaatcagtaaaatatggtagtagaagaaaatattcaagctattcttcactaatcaaaactataccttctggaagaattcaaggccaggactgtaaaagcagattaaatgaacaaatactaggcaattattcagtaataactaagttttcatatactttttaacttgtttctacaatggtacataaaattatttaggttagcacaccccaccatgcacgactaatttttgtatttttcgtagggacagggtttcaccttattggtcaggctggtcttgaactcctgacctcaggtgatccacccgcctggcctcccaaaatgctgagattataggcgtgaaccactgcacctggccaggacatactttaaattcttaaaaattgtaaccatttctcatttgtcacaagatctaagagaatgctatacagtgtaatgaagttctgaattttctttcagatgtttacaggtttttcttttatgcctttaatatgttattaaagtttaaatgtaaaaaggtgggggtttttttggtgctacccatcccccttctccagccactaggaagaaagctgtgtgtgtgttcctggagtggcttacacacagcttgtagcatccagggtgggcaaaaataagcctgttttccaaatactgggtatttgtgctctgatcactgattgctgcttctaatcatagaggtgaaaagagatggcagccattgttgttatagctcccctcattgcaaaaatgggtaaaggcatttaatagacacttcttcaaagatattaaaatggccaataagcacatcaaaagatgctcagcatcactaatcattagggaaatgcaaatcaaatctataacacgataccacctcatgcctcttaggatgacaattatcaaagaaacaaaacaacaactgtgggcgagaatgtggagaaatgggaacccttttgcagtgttggtgggaatgtaaaattgtacaatcgttgtggaaaatggtgtggtgtttcctcaaatagttaaaaatataatgatcatatgatctggcaatttcacttctgggtatatactcaaaaggactgaaagcagggtctcagagatacttgtatatccatgtttttagcagcattattcacaataactgagatgtggaagcaaccaaagtgtccatcagtagatgaatggataagcaaaatgtggcatatacatacagtggatatcattcagtcttaaaaaggaaggacattctggcacatgctgcagtgtagatgaaccttgaggacattatgctgtgtgaaacaaaccaatcacaagaaaacaaacactgtgtgattccacttatctgagatacttagggtagtgaaaatcacagatacagaacgtagaatggtggttgtcagcacttggcggggagggtggaattgggagttgtttaacggatatagagtttcggttttgccctgtgaaaagtgttctgaaagtggatggtggtggtgattgtaccatataaatgtacttaataccactgaactatactgttaaaaattgttcagatagtaaatgttatgtatattttaccacaataataattttgggggaaaactattgaggccattcataaatactgtgtttgtatatgtcctggcaacaaatttattccattccatacaaatgtctcattatgtgttgtgctgtgatttagctggctatattagtttgctaatgatgctgtaacacaaactggatggcttaaacaacagaaatgtattctagttctagaggctggaaatctgaaatccaggtgttgataggattggttccttttgaaggctgtgagggagagagtattttatgcctctcccctagcttctgttagccacaggccttccttggcttgtagatgacgttctccctgtgtcttcatgcatcttccctctctacacgtctgtctctgtgtccaagtttcccctttgtgtaaggacaccagtcatattggattagtgttcaacttaatgacctcatgatcactgtttgcacataaggtcacattcacaagtactgggacttccaacatcttttgggaggatacgatgaaatctgtaacactggccgataattttataaacatttatgttatttccagtttttctgtgtttaagttagccttgtggggcatattcttgtatatatatcctttgtgtttttgtgattagaagtagatttgcgaggtcagaggatacacacaattttgctgtacattatgaaagtaacctccagaaagtatatgcccatttatagtcccactgtcaatgtacaagtacgcacccgttttcgacacagtaaataacacattggtttttaaaatcttttgagtctttgtcagtcttttttattgtttttgtttgtttgagatagggtttcaccctgtcacccaggctggagtgcaatggcacagtaatggctcactgcagccactacctcccaggcacaagtgatcctcccacctcaacctcccaagtagctgggaccacaggcacgtgccatcacacccagctaatttttttatttttatttttttgtaaaaatgaggtctcactatgttgcccagacttctgtttgtttattgcagtaaaaacagtgaaaatttaccatcttaaccagttccaagtgtacagttcagtggtgttaagtatgttcacgtatttgaatatagattcacagatggccagaactcttctcagcttgcagatctgaaactctatccctattaaataactctccattctcccctccccacagctctaggcagtcaccattctactttctgtgtctatgaatttgactactctaaatacttcatatatgtagaaccatacagtatttgtctttttgggactggcttatttcacttagcataagtgtcctcaagggttatccacattgcagtatgtgataggatttcctttatttttaagactgaataatattctattgtatgtgtttatgctacattttgtatttattagagaggatttggaaagattagaaaaagataagaatgtaggagaggtactttggaaccaaaagcttgggggtttcattctctccatctcagatagtgctttttttgagacccagtttcattcttgttgcccgggctggagtgcaatggtgcagtcttggctcactgcagcctccgcctctcgggttcaaagattctcctgcctcaccctcccgagtagctgggattacaggcatgtgccaccacacccagctaattttgtatttttagtagagacggggtttcaccctgtcagccaaactggtctcgaactcctgacctcaggtgatccacccgcctcggcctcccaaagtgctggaattacaggcgtgagccaccgcacccagcctcagatagtgcttatgcctactatagctgagcttatttgttttgtttattttctgagttttctattaatattacgtctctgttcctcagaatggttttcctttgccttcccagcaataccttccaactgttagactggtcttcttgtgaaagactgtcttctaggatttccggggattgatgtatcttttcaaggtggaaatagaacagtcgccttgaaagaatttccgttagggaacccggatagttggcattttgcatgttttgttattttgttgtgcagtaggtgctctctgtgtttgtggagtataccacatagttttgttaccactctagtgcatcgaggcagataggatcagattgagagatgtgtgctactcctcgggtaaaatgaggtatttactggagccagttaacttctatcacaaaatgcccagccttggagttacactttttgtatgctttattcttgggagctgtgcttaattcacataacaaagcaacttaattaaaattagcctgtagaattccataatcgtgatgattgtgatgagaagtatttcacgtgctttgtttgaattattgcatttaatcctcacagcaaccctgtgaggtaagttctattatcctgattttacagatgaacaaaccgaggctgctagaagttggtagcgccagggtttgaagcaggcgaactccagagcctctctcctgcctctcgtgctctgctccttcagtagctggaggtgccattgcatgttgcaggccaggagtcacagtatacacagactgtcttttctgtataatgagcaaaagtgccaatcatttttaaattcttggactctttaggaaaaagacgtctacctggtggagcaccgtggcaggttgcctcagcgtgggaagtcccatgtacttccgttcaggtgctcaggaatttggagagccaggatggtggaaacttgttcataacaagcccccaacgatgaaacctgaaggagagaagttgtctgcctctactttgaaaataaaaggtactgttgtgagaacagtacaaaagttgctagtcagaccagagccaagcaggtgtgagcccaggagacgctcctgcttccactgggcatggctcgcaggcctctctggagctactctgtttaacacttctgtgatgacacttgtgtgtgtgctagaaataaatgccacataaaaacattttatcacttcctaatcaagctatcagttttataaatttcccagggtatctgaaaggttcaatgttttccatctggtttttgtttttaaacttctcacaaaggtgaagagatattttaaaattcccgtaataaataacatgatgaattcccatgtaccttccacctcactttgacattaactcctgacagtctcattttatctaaatcctcagtacttttccccaaccttccccattcttacaattggattatttagaaacaaatcccaggaatcaacatttcattcctaaatatcttagtatgtatctctaagagatcaggattctttcctttttgcagcctgaccataatgccattttcatatttaaaaagatgttaacagtgacttcttactatcacatattgatctggttttataatctaaaaagcttttaatgagcttttaaatttttatatttatttgtttgcttgtttgtttatttatttgaggtacagtctcgctttgttgcccaggctggagtgcagtggtgcaatctttgctcactgcaacctctgcctcctaggttcaaatgattctcgtgcctcagcctcccaaataacatgccaccatgcccagctaatatttttgtatttttattacagacggggttttgccatgttggccaggctgatctcgaactcctgacctcaggcgatccacctgccttggcctcacaaagtgctgggattacagggtgagccaccggatcaggctgatgagcttttaaaattttaaaaatatgattgggaagaaaatcaaatagtacttaagggtgtaaagtatgaaagttcccccacctgcctatggcctgcaatttcacttcccagagtaaccactgttgtcttttgtgaatactttcagaaagatctctgcagatttaagcattttcttagttttttaaaaaagtaaaatggactcgtactattatgagttttccatttttgccacacttaccagtatgtcttggacatctttccatgacagtacatgtagatttaccctattttatttcattacatccattatataattatgtgataatttgttaaaccattctcctgttgatggacattttggttgtttctacctttttgttgctattttatttatttattttttaattaaaacatttttaaaaagtaatagagatagggtctcgccatgtttcctgggctggtcttgaactgttgggctcaagtgatcctccagcctctccttccaaaagtgctgggattacaggcatgagccatcatgcctgaccttttgttactttaaacagtgctacaattctacaaatttgtgtacatgtgaaaatgtgataaattcctggagtttctacatcaaagggcatattcattcaaaattttaatcaggattgccaaattatcctccaagaaactgtaataaggccgggcatggtggctcatgcctgtaatcccagtactttgggaggccgagacaggtggatcatctgaggtcaggagttcgagaccagcctggccaacatgatgaaaccccatctgtacaaaaatacaaaaatcagccgggcgtgatggcgcatgcctgtaatcccagcttctctggaggctgaggcaggagaattgcttgaacccgggaggcggaggttgcagtgagccgagatcacaccactaacattccagcctgggtgacagagcaagaccctgtctcaaaaaaaaaaaaaagtacccattgaaatgcccatgaaaatgcccatttccccatacatttactgagctttatcaaactttttttttggctcactgcagccaccacctcccaggctcaaaatccacccacctcagcctcccaaagttctgggattaagaggcgtgcaccaccacgcctggctaaacttttaatgtttgccagttccagtaggtgaaagatagtatttatttgtttaaatttgcagtataacttcttttttctcaagagatatctaagtcttttttagtttagggcattcattgaacatttctctttattgaacatgatattactcataataataaattagcaaaagaaactaaagttgagtagttattttaaaatttagatatgggttgagcaatccaaatctgaaaatccaaaatcaaaaacactccaaaatctgaaactttttcagcactgacataacgctcaaaggaaatgctcatttgcagcatttcggattttgtatttctgggtttgggatactcagccaataagtaaaatgcaaatattccaaaagccgaaaacatctgaaatccaaaacatgcttgtgcccaagcatttcagatgagggatactcagcctgtatttattctttcttagcagcctcaaaaccaactttagatcccatcattactgttgagggacttagaaaacgagcaagtcggaatcctgtggaatctgccatggaattaaaagagaaaaggtctcgaactcaggaagcaaaagacattagaagagcccagaaggaggccgctggctttcttgacaggagcacatcttctacccctgtaaaattcataagccgaggccgcaggccagatgtgattctggaaaaaggcgaagtgattgacttttcctccttgagctcctctgaccgcaccccgctgacaagcccatctccttctccttctctggatttctctgcccctggtacacctgcctctcattctgccacacctagcttgctttcagaagcagatctgattccagatgtgatgcccccacaagccttgtttcatggtaagagtttgtttgctttgctcttttattttgggtatgggccatggtataaatgtacaagttttcaccccgtgggctgtgtgctctgcatttcttccttcctatgtcttgatgacactgttttgtactctgcacagatgacgatgagatggaaggcgatggagtcatagacccagggatggagtacgtcccaccccctgctgggtcagtagcttctgggccagtggttggggtcagaaagaaggtcagaggccctgaacagataaagcaggaggtagagagtgaggaggaaaaacccgacaggatggatattgacagtgaagacacagattcaaacacatctttgcaaacaagggctagagaaaagaggaagcctcagctggagaaggacacaaagccgaaagagcccaggtatactcccgtgagcatctacgaggaaaagctgctgctcaagaggctggaagcttgtcccggtgctgttgccatgactccggaagctcggagactgaaacgcaaactgattgtcagacaagcgaaaagggataggggattaccactttttgacttggatcaagttgttaatgctgctcttttgttagttgacgggatttatggagccaaagaaggaggaatttccagacttccagctggacaagccacgtacagaaccacctgtcaggacttcagaatccttgaccgataccaggtgaatgcaagcacttgctgtaaagcccttgggggcaggagtggaggtggggcaggcagcactaggcattggacatggttatgctgtgaccttttaaatcctgagtaatttgggaagagaaaagtaaagtgcaagggaaaaaaatacaaaaatcgctgggctttatttttcagaattgttcattgtaagtacacctgaatacatctgagtttttcttttcctttaggcattcaaacataacctataagttttcttcatctgtctctcttgtctctctctctctgaggatagatatgcatggtttgtgtcgtagctttgacaaatttgttgaggccatgacggtgtctctgacactgtgttgcagaggatctgaaggtgtgtagacatctgcgaaggacaacatgaagaaatagcagccaagggatcagtgtggtatcagtgttgctcaaaggatggtcggtggaacccaaattttgtggatgcttctgggaacaattaattccacttagaactacctgtatatactctcccactgggaggaacaagaggccttattccctttatctttgctagcacttgacactaaccagcctttaagttttgctaattggctggctgtaaagtgaaatcttgttttttatttatatttctttggttacaggtgaggttaaatttcctggttgtttctttgtgaattgcctgtttggagtctgcatgtttttctctcttctctggaagctagtgggatctgctcttcattgctggtgttctggtattattcagtgatgtgccgtatgtagggcttatgtctttccttgtgctggacatgtggtgtgtgggccctttcaatttgaaactttctttcctgagtatggaaaagtcttgatttcctatcttctattttttctgttctctcattttagaactccccattatttggatattggaccctgtagattaaaagttggcaaactttatctgtaaagaaataagtatttctgccagatagtaattattttaggctttgccggccacaaaatctcattcggaactcttcaactctgctgttgtgattggagagccgtagtgaatgagtgtggctgtgttccagtaaaactttatctactaaaatgggcagtggactggatttagcctgggggctatagtttaccaagatccctactccagatagatcctcttttcttttttttcctaattcccatctttcctgggaagcacagtattaactggcctgcctaccaggagccaagtcgggagggcccaggagcccatcgtttaggaggtaaactgactctccctgtcttcagtacagtactcccacccttggcttcctgtgtccagaatctccctcttgagcctctccagtcttctgcccgtggagggaaagatcatttcctagatgtgggcagtataattactataggggtataattggagcctttaacctcttaaagagcctcacaatccatagtcataccccccaggctctaagcctgatgccttaggtgactacacttccctgaggctgtgttttgtaaatcaccctgcttagcttcaccactggcttaggtattggctttctttggtctgttaagtcatttgctgcttgttcatatgcttttgttagtcatctattcacttgttcttgttctttttttttttttttttgagacatggtctctctctgtcacgcaggttggaatgtagtggcacaaccacagctcattgcagccccgaactctcaggctcaagcaattctcccacctcagcttcccaagtagctggtactataggcacacactaccacactcagctaattttttttttaatttttatttttagtagagacagggtcctactatcttgcccagactgatctcaaactcctgggctcgagtgatcgcctcagcctcccaaagtgctgggattacaggcatgagccattgcgcctggccaatattcacctgttctttgttcttattcttgtgggcctgtctgtttactgcctatacttaattttttaaattgtaagatgtgtcatacagatagaaggcagcatagaaatatggtataatttagatattagtaaaataaatgcccatgtattcatctcctggataaagagtgttgtaaacaccttagaagtctcctgtgtactttctgttcccctcagaggaagccactttgacttacagtgttaattattcttttgctttttaaatgtgtatgtctctaaatgatatacttttcgtttaaaaaaatactgagtagcaagcataaatctagctgtgtaagtaaattgccactattagatgaagtttcctggagaagataagctaaatagtcattctgggtcattgttgtggactgaattgtgtcccccttaagcatatgttgaagtcccaaccctggtacctatgaatgcagccttatctggaaataggccctttgcaaatataattagccaagaccaccaaggattgccggcagcaccaggagctaagagaagggcacagaacaaattctcccctagtgcgtaccccagagagcatagccctgcccacactgtgacttctgacatttggcctctagaactgtgagacaataaattcctgttgttttaagccacccagtttgtggtgctttgttcctacagccctgggaaactaatacttacagtgatgttctggcttcggcttccatgaaccccttctgaggtagtcactggccaaggtcactagggagtcctgggaaacatgaggctcaccatagcgtatgcatcagccagggctgtgatgtataccagagatgcggcagaaatctgggcagaggaagtgggatcctctgtatttcctgcctgagctgacagcttccttccagcttgcagaaggtcaaagcagttatttgtggagtgagcatcatcagctggtctttggggtgggcatgggtggtgtacaggaggctcacctgtacatggtgaagacaagctgagcgtagataagattctgggccacgacgccataggtttaaaagatggtcagtggcagcaaggacttaaggatgatagcctcaatatgtgttagaaataccaaaattgttagaaatagataatcggtgctgcgaagaaaagtcagcacagagacaaaaggtatctcagcaaggccatcttttctttctgtagaaagggtgctcagttgcagatggaacaaaggtgagagcacacttgaacacaggaaaagcagacatatttatcccttacgcacttgggtcgtccttactgctgtgtcctgcatccactggctggagcgggacctcacaatcttaaactgatacccgatttgctaatagcctaaaactttcctaaataggtaagtgcagggaagaacaaagaagttgcttacaaaaggtttaaggaagcaataacatttccaaataaggaaggggcgtagactgtgggctggaacgtgcctgtgagcatgtccaacggttacagaggatagggcttaacaaagagttattagcacaaggcaaggagacttgaagaaagttagtctttaaaagaaactgttatttctaacacttatgatttattctttaacaagaaggaaaactttgaagaggaaactttttactttctacactatgtctgccccttgggtcacacttgttcaccctttgttgtgaaactcagcaggggtgttgggatctcccctctctggagattcttttgccctcctctgtatttgatctcctgtttcctgtggcccatctttaccttgttataggtttattcccttgttcttaatgacttcctgagaaaagctgcatgggaagtaaaatttgagaccaacatactgaaaagaccctcattaagtgaggttgaacctggaattccatacacagccacattgtctaggtgagacctctgttgaggaccactgcacttcctttaggttttttctttgaatctagtcagagtccctggggaataatcttctgggctcaggatgctggttgccaagttggggaagagggaccttagcattcagcttgtcaggtactcacacctcagccctccagctggatcccctgttagttctctagagatcagacctcctggcttctgggggagggcagccacccagcaacagggagtggaaggatctggggatcatactgctttccacatggtgtttgcctgctccttattttattgtcccatttggtcccagttccagaggaatctgctggctgctgcctggattttagcgggttctgtagtatagattgggttagttctcatttagcttacccaaagccactttgggattttggtgttaaatcagttactatttgtccatctgtttaccagttactgttctaattaagtcagcttctatagttttagtgggattttgggaagtagtaaagctttatatgcttgtgttttaacccagtcttaacttggaattttagtataaattttaatgtatttacacagggagtggctgtaaatgcatttattcaatccatactcttgttttatatttattctttgaatgtattcgtagctataagtttctcaataagtgctgctttagctgtgattcttgacttttgaaatgatgtgattttatttccaatcagtacttggcattttgttatttttctcattatttcctctttaatccaaaggttatttagttgttttttggttttcagatatatgagaattttaagctatgttttggtaattgatgtgatttctaatgttgtattatgatcagagaaaatagtttatgtgatgttcattctgtaccataaagaaagttatacattctatttttattctttttataggtcctaacttaagatacatttatttttccttattctttttttaatatcatgtggttgtccccccaaacaaaaaagtacattttcatgcacttatctctttttttcttttgtattgcttatttaaatgacataaatctttactaaattattcactcgtcctattgtttctttctagattaatttcttgctggactgctttctctaacagttctttaaaaatatgggctttttgaggttaattttgaaaacttatacgactaagaatatcttcatttcactttttcatttaaatgatagcagtcatataaaattgttattttagttttttccattgatattttgaaattatgacttcattatcatcttacatacagtgtcactcctgagaaccccggtactgataagaaatagaaatttttgactgggctcagtggctcatgcctgtaatcccagcactttgggaggtcgaggcaggcagatcacttgaggccaggaatttgagaccagcctggacaatatggtgaaaccccgtctctactaaaaataaaaaaattagccaggcctggtggcgcatgcctataatcccagctgcttgggaggctgaggcttgagaatcacttgaaccagagaggcagaggttacagtgagctgagatcatgccactgcactccagcgtgggtgattgggtgagactctctctcaaaaaaaaaaaattttttttgtttcttatcaattaagtggcctccttgttttattctcccatctcctaaaactttcagaattttctctttgttttttatctttaattagtgcatgttaagtgtcttttattttctctttttaaagctttgttttcttttttctattattttattttccagcacatccaaaacacagaaattgtgtttgttctcatttgtcttacttgacaactctgttcttttggtcagaggtattttatatgcttcttggcatttattctgcttggtgttcgctgaccttcctgaatgtgtggtttggtgtctgacattaaattggggatattctcagtcattattgcttcaaatttttcttctattcctttctgtcttctggtattcccattgtgtgtttattacaccttttgtagttttccgcagttctcggatagtctgttttgttcttttttttcatcttttttgtctttgcttttcagttttggaagtttttactgacagatcctcaagttcagagattctttactcagccgtgtccagtctacaaataagcccatcatcaaaggcaacctttatattggttacagtgttttttatctccagcatttctttttgattcattttcagagttttcatctctttaattgcccatctgttcttgcatattgtgtattttgtccattaagcccttaacatattaaacatattataggcatatcttgttttattcacattgctgtattgcacttcacagatactgcattttgtacaaatggaaggtttgtgacaatcttatgtcgagcaagtctgttggcaccatttttctagtagtgtgtgcttactttctgtctctgtgtctcacgttttggcagtttttgcattacttccaactttttcattattattatatcttttatggtggtctgtgatcagtgatctttgatgttagtattgtaattgttttggagcaccatgaaccacacccatatgagacaatgaacttaattggtaaatgtgtgttttctgactgttgcactaaccagctgttccccatgtttctccctctccttggggctccctgttccctgagacaacaatattggaattaggtcagttaaccctacaatggcttttaagtgttcaagtaaaaggaagagttatacttctctcactttaaataaaaaactagaaatgattaagtttagtgaggaaagcatttcaaaagcagagataggctgaaagcgaggcctcttgtgccaaacaattagccaaggtgtgaatgcaaaggaaaagttcttgaaggtcattaaaggtgctactccagtgagtgcacaactgataaaaaatcgaagtagccttattgctgatatggagaaagtttgagtggtctggatagaagatcaaaccagccacagtattcccttaagccaaagcctaatccagagtaaggccttaactcttgaattctgtaaaggcttggagaagggaggaagctacagaagaaaagttggaagctatcagaggttggttcatgaggtttaggaaagaaggcagctctataacacaaaagagtgcaagttaaagcagcatttgctaatgtagaagcagcaacacgttatctagaagacctagctaagatcattgatggaagtggctacactaagcaagatgttcactgtagatgaaacagccttctatttgaagaagatgccacctaggactttcatagttagagagaagtcagtgcctagcttcagagcttcaaaggacaagccaactgtcttgttagggattaatgcaactggtgactttcagttggagccagtgatcatttactcttccaaaaatcttagggcccttataaattatcctgaatctaccctggctgtgctctataaatatagcagcaaagcttggatgacagcatatctgtttacagcatggtttactgaatattctaagcccactattgaaagctactactcagagaaaaagattattttcttttttgagacggagtcttgctctgtcgcccaggctggagtgcagtggcgcaatctcggctcactgcaagctccacctcccaggttcatgccattctcctgcctcagcctcctgagtagctgggactacaggcgtccgccaccatgcccagcttattttttgtattttttttagtagagacgggatttcaccgtgttagccaggagggcctcgatctcctgacctcgtggtccgcccgcctcggcctcccaaagtgctgggattacaggcatgagccaccgtgcccggcctgaaaaagattattttcaaacaattactgctcattgacaatgtacctggtcacccaagagttctgattgagaggtttaagattagtattattttcatgcctgctaaaacaacatctattctgtaacccatggatcaaggagtaattttgactttcaagtcttaccatttaagactctttttaaggctattgctatcatagatagtgattcctctgatagatctgggcaaagacattgaaaaccttctggaaaaggagtcatcattctagatgccattaagaacatttgtgattcatgggaggaatcaaaatttcaacatttacaggagtttggaagaagttgattccaagcctcatggatgacttttgaggggttcaagacttcagtggaagaagtcactgtggatgtggaaagagcaagagaactagaattagaagtggagcctgaagatgtgaccgataaatgtcatgataaaacttgaatgaataagtgttgcttcttatggatgagcaaagaaagtggttttttgagatgctatctactcctgctaaagatgctatgaacattgttgaaatctcacaacaaaagatttagaatattgcataaacttagttgataagttagtggcacagtttgactcagattttgaaagaagttatgttgtgggtgaaatgctgtcaaacagcatcacatggccaggcacagtggctcacgcctgtaatcccagcactttgggaggccgaggcgggcggatcacgtgaggtcaggagtttgagaccagcctggccaacatagtgaaaccctgtctttactgaaaatacaaaaattagccaggcgtggtggtgtacacctgtagtcccagctacttgggaggctgaggcaggagaatcgcttgaacctgggaggtggaggtctcagttagctgagatcatacccctgcactgtagcctaggcaacagggcaagactctgtctcaaaaaaaccaatatcttttgtgaaaggaagagcaggtcaatgtggcatgcttcagtgttgtcttattttaagaaattgccccagccatcccaaccttcagcagccaccaccaccctgatcagttggcaaccatcaatattgaggcaagagcctctaccaataaaatgattgactcactgaaggctcagatgatcattggcattttttaacaataaagtgtttaaaattaagtcacacatttttttcttagacataatgctgttattgcacacaacaacaatatagtgtcaacttttttttttttatttgagacagagtctcactctgtcacccaggctggagtgcagtggtgcgatctcggcttactgcagcctccacctcctgggttcaagcgattcttctgcctcagcctcccgagtagctgggactaaaggtgcgtgccaccacgcccagctaatttttgtatttttagtagagatgggatttcaccatattggccaggctggtcttgaactcctgacctcgtgatccgcccgcctcggcctcccaaagtgctggaattacaggtttgagccactacgcctggccactttttttttttttttgagacagtgtctcgctgtcacccaggctggagtgtagtggcacaatcatggctcactgtagctgtcagttgacttcctgggctcatgcagtcctcccacttcagcctcccaatgtgctggtattacaggcatgagccaccacacccagccttaaacataatttttatatgcactgggacaccaaaaacttgtgcagcttgctttattatgacattcactttattgcagtggtctggcactgatcctgcaatgtctctgaggtgtgcctatattttaaattcccagtccagtagctgtaacatctttgccatatctcagtctggttctgatgtttgttctgtgtcttcaagctgtgtttttttgcctttataccttgtaattttttgttgaaagccaaagatgatgttctgggtaagaggagctgtgataagtaggctgttggaaatgggggaggtgtgggcagggaaagccctctatagctctgtgagtagttctcagtcttttttgagcctgtgctctgggctgtggactaaaagtgcttctcagttttctctccggtcagctgggacaggatggctagagggtgtgaagttaggtatttctcttcccccaggtgagttaggctctgattaaatcccaataggttaggctctgataaaaataacttctcctgagggcaggtgttactaagaacacaatgctgtgttttattttaagatggttccttttcccctcctccatctggaatcaagaggggagttttctttgatattcactgtgagaacctggtccaacttctggaggtgaaccttgtggagtggagtttttatccttagacttgtccgcattgagccttcagcaattttcagttcttcagggctttcccgccttgatgctggttcccacagaggctctgctcccgtgtgctgtgattctctttctctccaaatttgagggcagtggtttgccttgttatctcatgtcttttacggatctacaagagttcttgatttttcactttgttcagtggtttacttgttaggctggaggaatgacttctaagcttcttgcctgccagagtggaaatcagaagtccttggatatgctgctgtgatctaggaaattccccattattgcttctttaaatatgttcctcctttatcttttcctcttctgcactctgaatatggatgttaacaccattacttcttttttttttttttgtcttttcttttgctttttaaacaaaatccttaaccagtccctgacatcatttgttgagtgctttatttcagtgatcatgtgtttaatatctggtaatgaataagagatgcttcataattactcattcctgcttccaggctcctccattaccttggaggctatttcttatgctttttcttccttaacagctttattaacatacagttcatataccttacaattcacctatttaaagtgtacagttgacgggttcctaatatattcacaaagttgaaccataatcaattttagaacattttgttaacccacaaagaatccctgaaccctttagctgttactacccaaaactccctattcctactgcccatgaattgactttctgcctctgtagatttatgtactctggacatttcacataaatggagtcatataatatgtggcctttggtgaacactttctttcacttagcataatgttttcaagattcatccatattgtaacatatattagtattcctaaatatggcttaatattccattgtatggatagaccacatttggtttatccattcatcagttgatggacttttgggttgtttctaccttttgactatgaacataaatactgctttgaacatatgtatacaagtttttgtgtggacacacatttttatttctctgagtgtagatctaggagtggaattgctttgtcaaatgtaactctgtgtttaactttttgaaggattgctagactgtcttccaaagtggctgtgccgttttacattcccaccaagcagggtatgaagattctgatttctccacacatccttgccatattgttgttgtctgtcttttttattatagccatcctactgagtatgaagtgtagtatctcattgcagttttgatttgcatttctttgatgactattatactttaaaattcttgtctgtttggtaaattaagtgtgccttttcctgtaatagcttgtttagtttgttatccttttgttttcttgcttttttttttatttttttttttgaggtggatttttactgttgtcgcccaggctggagtatagtgatgcgatctcggctcactgcaacctctgcctcctgggttcaagcagttctcctgcctcagccaccgaagtagctgggattacaggtgcccgccaccacacccagctaatttttgtatttttattagagatgtgggtttcatcatgttggccaggctggtctcgaactcctgacctcaggtgatccacccacctcggcctcccagagtgttgggattacaggcatgagccaccgcgcccggcgattttcttgcactttttatttatgggtcttgattttttttttccccgtgagctcatacccccttagtgttttcagctacctttgctggcagtttacacctagggaagagagcaaaagcctggttcctagcttttgaccctgtcagcaagtttagcaaaatgggaggttctgggcaaaaccatttctcctcctctctttttcccacaatcagccaccctcttctctcagggaacctcccaggacctctcgcccaggtgctgcttttaatctccctctggtgttgcttcctaggactgtgggatgctcaggggctgcccagagtggtatccaccctcacccaggaaggctctagtgctgctctggcgttaccttccagccaatacgtggctggcaaagttgattggcagcgatctacctctcccagagaagtgctcgggggaggagatggcttaaccaagcagcccctgacccatctgtggggcagagcctttttctgccctctctactctgctgcctcactcgtacccagccacctgtcgcctccccgggctttctcccagccttgtgttttgccttccctctcatgtctgtagcatctctcagatgggcttggaaagggaccaagcagccctcctagctctccattgtgtttagaattagaagtataaagaaactcatttaacattttttctcacttatttgaccttgggatgcttttttttcccacactttaccattcagcaaatgcaagtcaagtacataacatacaccgagagccgaaacatggctcaaacctgtaatcccagcactttgggaggccaaggcaggcagatcacttgagctcaggagtttgagaccagcctgggcaacatgaggaaacctcgtctctaccaaaaaaaatacaaaaattagccaggtgtggtgacatgtgctacttaggaggctgaggtgagaggatcacttgagctaggaggtcaaggctgtagtgagccatgatcatgccactgcactccagcgtgggcaactgagtgagactgtctcaaaaaaaaaaaaaaaaagccaggtatggtggctcacccctgtaatccccacactttgggaggctgaggtgggcagatcatgatgtcaggagttcaagaccagcctggccaacataatgaaaccccgtctctactaaaaatacaaaaattagccaggcatgctggcgcgtgcctgtagtcccactactcaggaggctgaggcaggagaatcgcttgaatctgggaggtggaggttgcagtgagccgagatgacacctctgcattccagcttgggcaacagagtgagacttcgtctcaaaaaaaaaaaaaaaaaaagtgccaagcgctattctagcaggggatctgctgtgaactaagacagagtaggtccctgtccttaggcagggggcatccttgagcagggagctgacattaactagctcaccaggcaaataagattacatcatgcagagtgaacgcggggacagtgatgttacatcatgcagagtgaacgtggggaggagtagcgggcaggagcactgctctatgggggttcaggacggcctctctgaggaggcagcacttgaactaagtccacaaggaggagccagggtgatgaagggtcagtgtggaaggcccaggcgcaggccctgaagcaggagttgggttggtgtatgtggctggaacctggtgatggcagagggaacgggttggtggctaatgaggctactggggtgacaggggccagatcctgcaggatcctacaggtcataagtaaggagtttgaactgcattctgaacatatggtaggaagccatgtcagagttttgatcaagggaagtgaatttatgtttttagaagactctggcttctgtgtcgagagtggatagtatgggtgtaagagtgggagcagagagaccaatgggaggcagttgatccaggcagcattgggagtggtttacactagagtgggaagaagttagggagctgtataactttgatggagcttcccagaacttaccttgaggcattaaccagataatgagagtattctgtgcagtaagtagttcagtgcctggtgttacagttatctgttgctgcattataaaccactccaaaacttagtggcttttgatccctgtatcttttttctgattctgtggattgactgggcactgttgggttctttacttagtgggctgaaggctgggttcactcatgtgctgcattaacctgagagctagtttgggattggaatgaccaggagagcctctcttcctccagagtccatctccctgtggcctctagttattaactggtctagctggactccaagagggagaaagtggaagcaagccaccagttgtcttaagacctagactcaaaagtcccagaaagttatttctgctactttctgattggtcagagctattcacaaggtccacccagcttcagtgggtggggaaatttatcctgccttttgatacgaggagccgcttagtagggatggaggaattgttagtggctgtatttagaaattacataccacacttttcagttttaccttgaaactgactttaagccttggaagaattcaaagttggcctttgaaaattttggtgtccagtttgggaaggtatgaaagcaaattataatggaaggaatcttgctctttccttttaacaaagttattttctaggttaagagcaaactgattctacaaaaacaagtttttaaacatcatccaacccttcgcaaacaactttataaatgtgccttttaatcttccatctgatttctttgctataaagccctaattgtacatgttctgttagtacatgactgagagccctggagcggcagtcattgaagaacaacatatttccagtccagctcttggggtttgaaatgaaacacataaaatctaccaagtctgttaggataccttcctagggaacagaggcctcttcctcattgaacccctgataagacctctctgctactgagatttattttagggaggctgaggcaggagaatcacttgaacctgggaggcagaggttgtagtgagccaagatcgcaccactgcactccagcctggataacagagcaagactctatctcaaaaaaaaaacaaaaaacaaaagtgacttgggtgctattgaaagcattccattttaaaagggaaacagaacataaaagttcagaaaagttgcagcctgacaatgcagtagacaaaaaaaacctattttttgaggagaaagtcaagctggctgcagaaatttacataagtaacaaggagccgaatgttaatccccaagacaatctccatggcattccacgggaatccacgggagtgatattctacatcactcccatttttgtcaaatttattcactggaaaagagattgtattagtttgttttcatgctgctgataaagacatacctgagattgggaagaaaaagaggtttaattggacttagagtcccacctggctagggagacctcagaatcatggtgggaggcaaaagccactcttacatggtggtggcaagagaaaaatgagaaagatgcaaaagtggaaacccctgataaaaccatcagatctcgtgagacttattcactaccatgagaacagtatggtggaaaccgcccccgtgattcaaattatctcccactgggtctctcccacaccatgtgggaattatgggaatacaattcaagatgagatttgagtggagacacagagccaaaccatatcattccacccctggcctctccaaatctcatgccctcacactaaaaaaccaatcatgccttcccaacagtcccccaaagtcttaactcatttcagcattaacccgaaagtccatagtcccaagtctcatctgagacaaggcaagtcccttccatctgtgagcctgtaaaatcaaaagcaagctagttacttcctagatacagtgagggtacaggtattgggtaaatacagcagttctacatgggagaaataggccaaaacaaaggggttacagggcccatgcaagcttgaattccagcagggcaaattctaaatgatctaaaatgatctcctttgactccttatcttacatccaggtcacactgatgcaaaaggtaggttctcagagtcttaggcagctccacccctgtggctttgcagggtatagcccccctcctggctgctttcatgggctggcattgagtgtccaacttttccagttgcacagtgcaggctatcggtggatctgccattctggggtctgaaggacggtggccctcttctcacagctaggcactgccccagtagggactctgtgtgggggctctgaccccacatttcccctctgcactgccctagcagagattatccatgagggccctgccctgacagcaaacttttgcctgggcatccaggtgtttccatacatcttctgaaatctaggtggaggttcccaaacctcaattctggacttctgtgcaccctcaggctcaatgcaaagtggaagctgccaaggtttggggcttgcaccctgtgaaaccatgggccgagctgtaccttggccccttttagcaatgactggagcggctggggcacagggcggcaagtccccaggctgccttctaggcttccaggtctgtgatgggaggggctgccatgaatacctatggcatgccgtggagattgtcttggggattaacattcggctccttgttacttatgtaaatttctgcagccagcttgactttctcctcaaaaaataggtttttcttttctactgcattgtcaggctgcaacttttctgaacttttatgttctgtttcccttttaaaatggaatgcttttaatagcacccaagtcacttttgttttttgtttttttttgagatagagtcttgctctgttgtccaggctggagtgcagtggtgcgatcttggctcactacaacctctacctcccaggttcaagtgattctcctgcctcagcctcccaagtagctgggattacaggtgtgtgccactatgcctggctaatttttgcatttttagtagagacagggtttcaccatgttggccaggctggtcttgaactcctaacctcaggtgatctgcccacctccgtctcccatagtgctaggattacaggcatgagccaccatgcctggccttcaagtcacctcttgaatgctctgctgcttagaaatttcttccaccagataccctaaatcatctcaaattcagagttccacagatctctagggcagggcaaaatgccagcagtctctttgctaaaacatagtaagagtcacctttgctccaattcccaacaaattcctcatctccatctgagaccacctcagcctggaccttattgttcatatcactatcagcatttttgtcaaagccattcaacaaatctctaggaagttccaaactttcccacattttcctgtcttcttatgagccctccaaactgtttcagcctctgcctaatacccagttccaaagtcatttccacattttcagatatcttttcagcaacaccccactcctggtaccaatttattatattagtctgtcttcatgctgctgataaagacatacccaagactgggaagaaaaggaggtttaattggacttacagttccacatggctgggtaggcctcagaatcatggcaggaggtgaaagacacttcttagtgggcagtggcaagaaacaaatgaggaagatgcaaaagcagaaacccctgattaaaaaaaacaaaacatcggaccttgtgagacttattcactacgagaacagtatggtggaaaccgcccccatgattcaaattatctcccaccaggtccctcccacaacacaaaggaattaagggagtacaattcaagatgaggtttgtctgggaacacagagccaaaccatatcagagatgtatttcaaaaattctatatacagtagtagttggccccagtggctctttggataacagagcaatcatataatatgactcatgtgtgtgttacctacttgatactagttaatatttagtgaatgggttgaaggcataatatagacaaagtgaagcctagagaagctgcaaatccagtgttcaatcctgcatctcactccctctaatgagttaaaaaaaatttttaaatgacttcagaattttaaaattattatttttattttaaacagctggggttttttgtgtctagttttatgcaaaggtgtctataaactttgtattgaagtttgagctttccaaataagtaatacaaaaagacctactttatgacacataaaaatatgatactaattatatatggaaattaaccaatcctcagagtaattttgtttcttttttttttttttttttttttgagacggagtctcgctctatcgcccaggctggagtgcagtggtgcaatctcggctcactgcaagctccgcctcctgggttcacgccattctcctgcctcagcctcccaagtagctgggactacaggcgcacctgccaccacggccggctaatttttgtatttttagtagagacagggttttaccgtgttagccaggatgatctcgatcttgtgaccttgtgatccgcctacctcagcttcccaaagtgttgggattaccggcatgagccactgtgcccagcctgagtaattatttctatataaccagtgtttctttctcatagacttccttgccgtccaggaagggatttcgacaccagaccaccaagtttttgtatcgcttggtaggatcagaagatatggctgtggaccagagtattgtcagcccttatacctctcggatcttgaaaccttatatcaggtatatggagaactagaggtgtgatgtcaggtgtgtcatgagggataatgattgtggtttctgtgccctgttctcctgttggagagaataaagatcacaaactgtgaacaacattggcaaggactgagttctgtgcttcacctccagttttgtcctttgcttgtttcaactctacttttttgcagagaacatggtcctttgaaagaaacttaaaaagcaaaaataaattaactgaaagattgctttgtgatgatcataatcattgttttatttattattattattttttttttgagacagactcttgccctgtcacccaggctgggctgcagtggtgcaatcttggctcactgtaacctctgcctccggggttcagggaattatcttgcctcagcctcccaagtagctgggattataggcatgcaccaccaagcccagctaatttttgtatttttagcagagacagggtttcaccgtgttggccaagctggtcttgaactcctgacctcaagtgatccacccagcttggcctcccaaagtgctgggattacaggcgtgagccactggggccggccctcattatgttattttaaatactaaagttgtatatttttagtagtctgaaatgaaaaaatgtgaaagacatctcagttgagcctccatctggactggatgtatatgaagcagtttccaataatgaatgtcattgtccaggcaatgaaatggaagctgagcttgctagagaggacccagcagtgtctggcactgtaaatgagagcacattattgcactcattgcactacaattgccctgcagctccatgatcaccctgaccctccatgccagcaccacattcctgggcaggcacagtgagaagcagtttgtgagcctgctccaagctcattgtgtctctggtgttccccaaatgccccgcaaagttgagtgttccctcttctggcctccaaggcactggagatgcatcctcatgtctgactccttggggtgaatctgatgctgtatctgtttcctcactgttcatgaaggcacctagcacagtccctggtgggtacagagggctttggcctgatgaatgttcagagtgaattttagatttcatacataaaagtatagctgtaatcaagccagcttcgtgtaaaacagtgcaggttactttaaagtttcaagcagatcaaagagtttatatgagtcaaaaagctaggaataataccaggtatttttcttgacttgaatttgtttatcttctgtggtaccggaggcgtgattatgaaacaaagccacccaaactgcagctcctgtcacagattcgttcccacctgcacaggagcgaccctcactggacgccggagcccgacgcacctctcgattactgttatgtgcggccaaatcacatcccaacgatcaactccatgtgtcaggagtttttttggcctggtatgttccccctcccaaaccaggcaggtcatttttctgtacagtccattctagcaatttttaaaattagtttatgtgatatccttaagatttttatttatgatttcgtttagtttgtctctgctaacatggaaatattaaaatacaaatacctcttgctttcccaaaatctagaagaagccagcaataaacagtgtttttgtttgtttctcttccctgtttgtctctgtttccagagtaaaagattcatcctgttttgcttctgcatatgtttagataccaggtaatgtctatcaaagatacacagactggtagcttgggcgtgtttggacacttttgtttttggcttaataattctttatgttttgtttatttagctgttccttagagagtattagtacagccagaaggtgttttttaaaagccaaatgccctgatcacagactgagaataagggtaaacccaatataatttgtcattttatcagccttaacaaaattgcctctgaagaccaaagtcattaattaaaggaacacatttgcattgctaaatataaactattctttgtggatctgctttcccacgctgccttgaaacctaaaggaaataatacatgtctttcagatgttagatacgatttcatcaagatagagctgtgtcgtctttattgtcacataatcacataactgtgaatgtggtggcagagctgcactcattcttttgggagtcatactgagccaaaagtaacattctgggagcatctcctgcttcctgcccttatgttaggtgccttccatacattatgcacagaagcatattttacttatttattgtgaaaggtagcatttgtacaaaagaacttataaattatatgtgtggggggtaaaggatgtgatagaacacgctcggaggatctttacttaaccctgtcaggtctaggtatgctcttcatcttacatattgcagaaacggagtctctgagacattttgaaatgtgccaagccacacatggtagaggaggctgagttcaaagccagctgtgtccaattctgaacccgtgcactgctacctaccctattctgccactcttcttttaggaaatactatgtaatttcaatattttctaaaattcactcttatttttatgatctggttgtgtggtctctatgttacctccagttttggtgttttttttttttttttttagcatgcaggtgtagctatatgtacatgctgaacagcttggtgttccttaattctcaaaggcatgtggtttgagtctccgatggtttcttttctttaggcattgacctgtctgagtgtctgcagtacccagacttcagtgttgttgttctttataaaaaagtcatcattgcctttggcttcatggttcctgatgtgaaatacaatgaagcttacatttcatttctgttcgtccaccctgaatggagaagagcagggattgcaactttcatgatctatcatctgattcaggtaagttgtctatgtttatgatttatcacctgtgtctgggctcccctgaacaacctggaggaggaatgaagctgagctagcccttcccagcatggcccaatggaatggtttccttgtaaaccaagtgaagaaagccagtcatcagcattcatgaggttatcaaagcacacagtcaaaaatcttcgaccctctaaaataagattattattcagactcaggtttcatagaaaccagtttgtgaacatgtgtataaataaaatgagaaaataccaaaagcaagagctttagggtggactattcatattagtagtagctactgctcttaggatcatcaccttcgcaactcagagaagtgagggtaggactattatttttatttttttaaatatttgtaaacattttagcacaactgtatcaataagaatatgtatatattttttgagacagggtctcattctgtcacccagactggagttgcacaatcatagctcactgcagcctcaacctcctgggctcgagtgattttcccgcctcagccttctgggtagccaggaccacaggtgcacactgccatgcccggctgattttttgtagggacagggtctcactgtgttgcctggtctgtgcttgaactccttggttcaagcaatccttccacctcagcctcccgagtgctgggattatgggcatgagccactgtgcctagctacatattttatttttgctgatagtttgtaattttactatcactgtataaggctgatatgaaccttctaagatttgattctagtattgaattataattcatcctttaatatatttgtatcacctttgaagaaaatacaccatatatcaccatcaaaaaacatgcaaggatttttttcccctagaattttttttagtcaacttttacttagaaaccatttggtatggaggattatatgtttatgcaggcaagattccttttaaagaggagatgaagatgataaaagttgtttctccaatttttaatgaaacttgcttaataattcccaaatgttggcaggaaccttggaaccattttcctagaaattgctttccttctctccttaggcagtgattatgtaaatcactcactgagtaattaatatgtgctactttgggtggtggttttctcttgagagcttctcagttatttctacaacactccctttctctgccccatcccaaccaagagttgatctctcagtatgcgtctttttaacctaggagagcacttagaggatttgctgccgtatctgtcactggtaagggcctgaagacagggcacgaatagtactctgtccttgtgtgtgtgtgtccttggtgcccaacatgagggctggtacagagtcagtccctgctgagtgtttgcgaggccactggaggagtggttcatctttgcaggtgggcaccttcccctccagccagaccatacccctgagggcccaaacataggtggcgcacagtcgctggcactcaatgatggccacggtgagatcacgtatatttgcaatctagcaaacaccaatatgaccccacaaaatttgctttaaaaactcacaaagtgctcttgtccctggcatactggtaagtgctctcttgtcctaaaaatgcctatggatacacatggaagttaagcagagaaagcaggtagctatcagatgactgtcaacagaggagttcttagaggcctgagagaaccatgggttataaatctcaaggactctatcaacttcagtatttcagtgccttctttattaaaaagtaagttcttaaatgatatgacttttgggacaccttactctgtgtagctgattaaagaatctaaggacttgccttgtgttgatagaatgattgttactcttttcccctaagattaggtcaaagctgaatgtagaaatctcagttctaagaagctaattctgtcagttttagagagacagaaggtggactttgggattcagaaggtctatacaagggcctcaggttttataattacattcttaatatttcatgtttgtgcatgtaatttagcaggcctagtaaaggaatttttacaggttttggggaggtacaagataacatctagttttaaaaagcaaaacttattttgttttgtatttattcaaggttatcatagtgttaggtattgaaatgtttgacatatttaaaggtaattgagttgtaaataataaagctgacaataacaatatccccattgaccctttgcttcaaagaaaaataaaaaacacccagaatactatcagtttccttggtcttgtgaatgttttgatcagcagcaaaatgtcattctgtttccagctgttgctaggtgttgcaatgtctcagcctcagtctctgatttctccggtttccataactaactgcctacacttaaaagcgtttctttacctactcattttccctcaggcctttccatttttatcttgtatttttccactcttttggcagacctgcatgggcaaggacgtaacccttcacgtctcagcaagcaaccccgctatgctactgtaccagaagtttggattcaagactgaagaatatgtattagatttctatgataaatattacccattggagagtacagagtgtaaacacgcattctttctgaggctccggcgctgatgcgaatacagctcacagagaaacgcatgtgctattggagaacaggtctttgtggagatctaaaggcagtgattgatttcacagggagctctaatctctgtgattacatggtccttcaaactcccaaccaaagtgagaaaagcggcatgcagtgaaatgagcagtgagcagccctttagcaaaatcgccctccagtccttcctggagatgccttcagccagcatcccagactccacagttatttatgaatgatgtcgtgattctccctccacctgacagtttgtaagagtgaaagagcatctaacctgatgctcttggagagagataacctgtctgtcataacttaaaggatgagaaaatgtggtgtagctattaaagattcatgcagtcccaaaaggcactgtcctgggatgatgagagattataaggtgatttcataaaaggaatccaaccctgtgcccggccattgatgtgttgtcattgaatccaggaggatttctagggcactgaagttttgttgtttcttttgctgactttggttacagtcagaaaaaataaactagatgtttgtgtctacatgttctacctgttgtacctattagcatcttcctgcagggacttgggcccatggcctgggaggttggtttgggattggggttgttgggcagcctgccattcacctggcctatcctggcccttctcatgcccaagacagttgtttcacaggagtggaagtgtgggtgatgcaagtagaaccctctagatgtaccctgtgtggtctgcaggactggactgtttgctgtgtttgtggatgttggcgatagactgtcaattaggttgtttgtgatccaacaagaacatttccaaaagtatctaggtgttctcaaataaaaagctttctttgcacaacccatggccagagcgtcaatctagtcagtttgctttcaaaccctctttaattaagatcagtggttcttaactttttgggacatggatcactttgagaatacaaagaaagctgaatactctctagaaaactgtcatgcacatttaaaattttgcatcagggatctgtcgaccacaagttaagaacatctgttctagaagctgtacttgcagccagctcgaattcctttgtgagagagaatgtgttgagctcccacattaagccaatctggaagctgttcagtcatctggggaaacagttgaggctccatttcatttgtgagaggaactgtagcagcactgtcttatctatttctttccttttctttacctcctaccctgcctcccaagagttttctgcctctttggaaggtttttgttgacagaatggattgtaacaccacgaagtaaaattgaggagacaacatttccacatctgtaaaccagcttgtgattgttgtatgtgaatgtcaggcatttgttgttgcaaagtgggggctcaaataattgtctctgtaacttcagggagctgaggaaagctgtgattgcttttactgactctgtttcactttttttttttaattttgagaaattttaaaaacccttttcatttcttttttcttttttaaattttgagacagggtctcactttgtcgcccaggctgcagtgaagtggcactggcgcaatctcagctcactgcaacttccgcctcccaggttcaagtgattctcctgcctcagcctcctgaatagctgggaccacaggaacacgcgaccacacctcgctaattttttgtgtttttggtagagatggggtttcaccgtgttttccaggctggtctcgaactcctgagctcaagtgatcttggcctcccaaattgctgggattataggcatgagccaccacacccggcctttgagaaattttaatcacacacaaagacaatgatgccacaaaccccatcacccatattcaacaattgttgaaattctatgtcatttgcttcatttatccttttttttttttgctaaactatctgaaggtaaattctagatatcatataattttaccacttcttactcaaataggtatttctaaaaaataaggatattttcttatataatctcagtgttcattatcagtcctctaacaagatgaacatgtttggaattatctagcagtcaacctgtagtcacaccttttgaattgtttcagaaattccttttacagttggtttgttggatcagcggccaagcagggtccacataagtgacttactgtcctgtctccaccgcctgttcatccagagtgcctccgccctattactgcactgccactgacaacatcagttgtcccatggcatgtcccacatgtgggttgtctgttgcgtccttgtggtgtccttcatggggcaggactgactggacaaggtgaggagtggacctatgcttgtctctttagcggagggtggggacagctgactccctgccccactccattccctgcttgggtgttggggcagggccatttcccaggggtgggcttgatggcccctgtgtgtggggcagctgtcggttttgatctgcctttctctctggcccttctgagctagccctgtagtaaacccttagctagtcctctagaagtgaatctccacagtgccaggcttggggctgggttgcggaagagccatgttttggtggattaaagtcaaaatttactgtgaagtttcagaatatcaagtaaggaggaaggcttgttttttcatgccacaaaagtgagaatgagttctgaatgagttctgacaagctgaagagctctgccttcagttgtgtgttcgtgagagagtctggattgtccccttgggaggtggcctggggtagccaggtgggcctttgggatccctagggggttgcagtaattctgattaattattgtccatatttactcagtcttgttctagggaggttgagctctatttacagcaggatggttaagaaccagaaacataattttaaattttctaaaggcagttaacatattttacataaagttttcatcacctaaaagccacattgccttgggaccttttcctggaactgtctcctgcaagtggcttggtgtattcactacagccctggggagaagcatccaggttgaccccacaatgtggggttgcattacacagtgtggttaagcatatcctccaggtatctaacagcaggaagttgcagtaaaaacataatgtacctcagaactgggaatggccatggggtcatgagactcttcattagtacatacctaactcacatacttgtgagtttgttagtacatacttgactctgagaaatgtattacagttatttatgagaaacaagttcacagtcttagtgaatgtcatgcttcagcttcctcatctgtaaaacagggttgatgagacccacctcacacatttgtagtgataggtacaacaaggtcaagaaaatcacaaatggaggaccctgaattcaaagccaggcagtctggtaccacagccttcagccttcaccgctctggctaagccttggggagggggctgggaggtgtagggggtagtttagggggtctgtgtgtgtctggctcggtactgcccccagtgcctggagtggtgcccagcacagagccagtactccacacattggatgaaggagggagaaaatgagctgtgtgtaccgggagttcaatgtgatgagagacctcagtaatgcctcttgtttttttcactttttaaatataggcatggaatctttctgtttatcagaaatcataagtgtttctcattgcacccagccccttctctttgcctggataggtaaaggcaactcttagcctcttagaaccttacaacattatatacaggttaccccatgctagaacaatctctacaaaagtaaccaaagactgtagtaaaatttcagttttatgagctaaaggaaaagactgatggctgctcaggttaagaggctggaaggtggacagtttgtgctgtcacagatggaatggctccaggcaagcccacgtgtgtgaagggcagctcagccttcctctgtagccttgctgctcatataaggtggaattttattgcaggtgacctcagagcataggtctggaaggccactggcccaagcatggagacaaagtccacctggaaactcagaagacccaacattctatccagcagagcaggttccaggtgcatcacatgtgaatcccctcagcccttgggacagccagagctcctaggagtttgtccccattgggtgcagtcagtaatgtgctgataaatgaccacagactgggggtgaggtggggagagggggagcagtaaaccaagcccctgatgtgtagtgtttgctgattttcatggtgaaatactgttactatggcaaattttctttttcttttttcttttttttttttgaaacagagtttccctcttgtcacccagggtggagtgcaatggcacaatctcggctcactgcaacctccgcctcctgggttcaagtgattctcctgcctcagcctcccaagtagctgggattacaggcgtgtaatcccaccacgaccaccacgcccagctaatttttgtatttttttttttttttttttttgagacagagtctcgcactgccgcccaggctggagtgcagtggcgcagtcttggttcactgcaagctccacttcccaggttcatgccattcccctgcctcaacctcctgagtagctgggactacaggcgcccgccccattcccggctaattttttgtatttttagtagagacggggtttcaccgtgttagccaggatggccttgatctcctgacctcatgatccacccgcctcggcctcccaaagtgctgggattacagatgtgagccaccgcgcccggcctaatttttgtatttttagtagagatgggatttcaccatgttggccagactggtctggatctcccgaactcaggtgatccacccaccttggccttcccaagtgctgggattacaggcgtgagctaccacacccagctctatggccaattttcaagctaccaatgtgatgtcactaaacccagaggtagaacgatgtgtacagtagccaccattatattgtatttctgtcacgcagaaacaatagatggaagttacctcagaagcacaggtaatagtaacaagcagtcatgacaattatctaattgtcatgtagtaagctgttttgtttgtttgtatcttatagagatagggtgggtcttgctatgttggccagggtggtcttgaactcctggcctcaagcaatactcccacctcagccttacaaagtgctaggattacaggcatgagccactacacctggctgacatttagtacgttttgaatattgattttaaatatgattgatttaattaatgtatataatttaacttttaataatgactttggaaatctaaccagcagctcctgcatgcagccacctcagggctgggcacaatggggtctgatagcttgcctggtggtcccacaagcagcagacttgagcagctcctggagctcaccacgtgcggcccacagtgtgagcctgggcaaggacagagctgcctcccgaggagttcctgtgctgccagtagcagctggtggaggcggactaggaaggtcagggaggctttctggaggccctgggaggcccaggttgcagcctcacacacattggattgtctgtggcttttgtagcttccaagctggctgcagggagaccactctactgaacacattctatggcttaaagtagtggtccccaacctttttggcaccagagaccagttttgtggaagacaatttttccatggactggggttgaggggggaatggtttcaggatgattcaagcacattacatttattgtgcactttatttctattattattacattgaaatatctaatgaaataattataaaagtcaccataatgtagaatcagtgggagccctaagcttgttgttttgcagctaggtggtcccatcttggggtgatgggagacagtgacagatcatagggcattaaattctcataaggagtgcacaacctagatcccttaaatatgcagtccacaatagggttcacattcctgtgagaatctaatgccactgctgatctgactggaggtggagctcaggtgataatgcgagtgatggggagcggctataaatacagatgaagctttgctcacttgccctctgctcacctcctgctgtgcagccccgttcctaacaggccacagaccagtactggttcatggtctgggggtttcagacccctagtttagagctttcctgccacttaaaaacacatgacttgaaaaaatgtcttttggattcatgtttcattcacattttcacaattatcaacgttacatttgtccattagaaaaaagatggactgctgctccctccccctccccctctccctctacccacggtctccctctccctctctttccacggtctccctctgatgcccagccgaagctggactgtactgctgccatctcggctcactgcaacctccctgcctgattctcctgcctcagcctgccgagtgcctgcgattgcaggcccgcgccgccatgcctgactggttttcatatttttttggtggagacggggttttgctgtgttggccgggctggtctccagctcctaactgcgagtgatccaccagcctcggcctcccgaggtgccgggattgcagacggagtctcgttcactcagtgctcaatggtgcccaggctggagtgcagtggcgtgatctcggctcgctacaacccccacctcccagccgcctgccttggcctcccaaagtgccaagattgcagcctctgcccggctgccaccccgtctgggaagtgaggagcgcctcttcccggccgccatcccatctaggaagtgaggagcatctctgcccggccgcccatcatctgagatgtggggagcgcctctgccccgccgccccgtctgggatgtgaggagcgcctctgcccggccgcgaccccgtctgggaggtgaggagcgcctctgcccggccgcgaccccgtctgggaggtgaggagcgcctctgcccggccgtgaccccatctgggaggtgaggagcccctccgcccggcagccgccccgtctgggaagtgaggagcgtctccgcccggcagccaccccgtccgggagggaggtgggggtcagcccccacccggccaaacaccccgtctgggagggaggtgggggggtcagcccccgcccggccagccgccccgtccgggagggaggtggggggctcctctgcccggccagccgccctgtccgggaggtggggggcgcctctgcccggccaccccttctgggaagtgaggagcccctctgcccggccaccaccccgtgtgggaggtgtacccaacagctcattgaggacgggccatgatgacgacggcggttttgtggaatagaaaagggggaagggtggggaaaagattgagaaatcggatggttgctctgtctgtgtagaaagaagtagacatgggagacttttcattttgttctgtactaagaaaaattcttctgccttgggatcctgttgatctgtgaccttacccccaaccctgtgctctctgaaacatgtactgtgtccactcagggttaaatggattaagggcggtgcaagatgtgctttgttaaacagatgcttgaaggcagcatgctcgttaagagtcatcaccactccctaatctcaagtacccagggacacaaacactgcggaaggccgcagggtcctctgcctaggaaaaccagagacctttgttcacttgtttatctgctgaccttccctccactattgtcctatgaccctgccaaatccccctctgcaagaaacacccaagaatgatcaataaaaaaaaaagaaaaaagatggactgctaagactcttctaatttcaactcttagaaattttcagattttaaagaaaggaaggttaaatctaaacaattttttaaatttacttatttatttttgagacagcatctcactctgtcgcccagtctggagttcagtggtgccatctcactgcagcctccttctccaggtgcaagtgattttcgtacctcagcctcctgagtagctgggattacaggcgcatgccaccacacccggctaatctttttgtatttttagtagagacagggttcaccatgttggccaggctggtctcgaactcccgacctcaggtaatccacccacctcggcctcccaaaatgctagattacaggcgtgagcctccgcacccagccaggaagattaaatattttatcacctacttttgtcaatgtttctcattggttacagtcaggaactagaagagagaattgttaaaaacttgtgattaggaattgtatgcaaccatttcaagggtaatatctgatattttttaaatgtccatgaaaaccagatcaagtttctcattaaaatatgtgaagagattttatttgaaaatgatatataaattcaatatttagtacatttttttactttatctctcctaagaatgtgaaaatgattttcttcactaagctccaagtgcatgcgttcatccctctggagtgtccagtatgtggcacagatactcttttatttgtgctccatgactcagggagaatgctgactggccacctctgccatccagtcacagccaaaggacgttctcagagccactgtctcagcaactccatgaggtggtcctgtaattgcctctattttatgaggagaaaagggaggcttgagaggtaaagaaactccccaaggatgcgcagatagtaaagtagggctaatggttagagagtaatgccatggctaggccacagatggaagggattgcaatggaatataagggaatattctgtgttcttttttttttttttgagagagagtgtctcgatctgtcacccaggctggagtgcaatggcgccatctcagctcactgtaacccctgcctccgaggttcaagcaattctgcttcagcctcccaagtagctaggattacaagcgcctgccactacacccggctaattttttattttattttattttatttttgagactgagtcttgcactgttgtctgggctgaagtgcagtggcacgatcttggctcactgcaacctccacctcctgggttcaagcaattctcctgcctcagcctcccaagtagctgggattacaggcacccgccaccatgcttggctaattttttttgtatttttagtagagatggagtttcactatgctggtcaggctggtctcgaactcctgacctcgttatccacccgccttggcctcccaaagttctgggattataggcgacagccaccgcacccggcctaattttttgtatttttagtaaagatggggttttgccatgttggctgtggctggtctcaaacttctgacctcaggtgatcagcccacctcagcctcccaaagtgctgggattacaggcataagccaccgcgcccagcctactgtgtgttttttttttttttttttttttttttttttttgagacggagtctcactctgtcacccaggctggagtgcagtggtgcaatctcggctcactgcaagctctgcctcccgggttcactccattctcctgcttcagcctcccgagtagctgggactacaggtgcccgccaccacgcccggctaatttttttgtatttttagtagagacaggtttcactgtattagccaggatggtctcgatctcctgacctcgtgatcctccgtcctcagcctcccaaagtgctgggattacaggcgtgagccatcacgcccggcagctatttgtttttaaagacagatctagctttaaaaatggaagcaacttgatcaaaattctgttacaaaatttttgaaaccattgaagtttaatgttagataaaaaattaaatttagagaactacgtgagaggccacgtgctgatgcctccccacattatattttgctcggcaaataataatgcctttatttgctaaaatgctagcttgtgtcagtgtctgcaatggcttttctgtgcaggagtaggtgctgttgtctgcattaaccaggttttggactccctgggagctgaggcagcttttgtcctccccagcacttggctgaggcctgggcacatagagacgctcagttgccaagatccccaaagcagtgacggcttgcctccggagaacaagtcctctggacagcttaccgctttcctccccttcccagagagctaaaccagtgcttcccagccttgccctgcaaaaaccccaacacagaaggaggcaccagctatgacctggcaagaactcacatcctttgaggtttcattgttaaaaattgcagctatgggccgggcgctgtgactcacacctgtaatcccagcactttgggatgccgaggagggaggatcacctgatgtcaggagtcagaccagtctgaccaacatggtgaaaccctgtcctgactaaaaatgcaaaaattagctgggcgtggtggtgcacgcctgtaattgcagctactcaggaggctgagataagagaattgcttgaacctggcaggtggaggttgcagtgagccgagattgtgccactgcactccagcctgggcagcagagtgagactccgtctcaaaaaaacaaaaaaaattacaggtatgttatattctgctctttaagtatatctgattgttttaatattaaaatggattttttcactccaaagctttgggtagaattgaaaccctaagaagatgggcagttttagcttatggtttgggacactctatgagcctccagagagagagagtgtgcgcacaagcacacacacaaatgtgcactatcaatctgaaatttcattcttttcctcttaatgaataatcaaggagttcaagacacacttgttttcactttgacactataattcgtttcattttgagaaagagaattttgagttgaagataaatgacagttgaaaagcaaacgtgctactaatatgttcacatttgcccaaaatgtctagtattccagttaaactgaatattgctaaaggttcaattaaatgaaaagatatgtccagtgaaggacattaggctccaagtgggataaaaagaaaaagcctgatcttagaaggtcttgaggaagcaaggattgttggcaacatgggcccttgagattaagccttaggctatggcctcatgcctctgagtacagtagttgcttaccactgaggagcagacactactcagctcttgcagagccagtgctaggctgggcttggtaaaaacagcaaaggtcacaaagcattaagcagacaatattaggtgctaaaaatacaaaaataacggaagctcccatttctgaactcctctttctccagcagccctatgaggtggtcctgtaattgcctctattttatgaagagaaaactgaggcttcagaggttaagtaactccccaaggatgcacagatagtaagcagaagatagcatctaagtccaggctagaatgggcctctcagccagccccctccttgtctgcagaagtgagtaagatgtaggaggaaaatcatccaaggccaaagaggcccttgaaccctggatagggactcatgattcagagcccagccatatacttcccattcactttgctggtgggacctctaacttcttgtttagatatttgattgctggtctcccaagtcaagtttcttaatctgaggtggttgtatgcaaaggcaagtgtatatgagtatgagagtatgaatgtatttctggggagagggcctgaagctttatcagatcttcaaaggggtatgtgagacaaatagtagtaattagccctgtttagatgcagactcgaggccgggcgtggtggctcacacctgtaatcccagcactttgggaggccaagatgggcagatcaccagaggtcaggagttcaagaccagcttggccaacatggtgaaaccccatgtctactaaaaatacaaaaatttgccaggcatggtggtggttgcctgtaatcccagctcctccttgggaggctgaggcaggagaatcatttgaaccagggaggcggaggttgcagtgagccaagactgtgccactgtactccagcctgggcaacagaatgagactgtgtcgccaaagaacaaaacaaaacaaaaaacagatgcagactcaaggaagaaactttctagagccagctgggtagttgggataaaggtacaaagggaacgactcaccaaacaaatttaaaatgtttattttaaattttgacataatatcaggcttaaggaaaagttgcaaaagagaacaaagaatttccagatactctttaccccagttctgtaaatgttaatattttatacatttgcctctccctcctctctttctcacacatgcacactcactcatacacacagacactttttttttctggacaagttaaaagtaagttgcagatatcatgctcattttacccttaatattttggtgtgtatttctaaaagcaaggaatgttcttacctaaccacagtacaatgatcaaaatcagggaaatcagtgttaatatgctgttatccaatctataaatcaaattcagatttcactaattgtcctactactgccctttatggcaaaagaatatccaagatccagtgttgcattcagtggccatgctgctttaatctataatcaggaactgttcctgagtcttttttgacattgacattttgaagagtacttggctaatttgtagaatgtccctgaatttgggtatgttcgctgtttcctcatgcttgttgaaatttgtttttgtgacctaacatatgatctatcctggagaaaggttcatatgctgaagtgaagaatgtgtgttctacagcagttagatgaaatgttctgtaaatatctgttaggtccatttggtttagagtgcagtataagtccgaagtttctttgttgattttctttgtagatgacctctccactgagtgaagggtggtgaagtccccaactattattatattggagcctatctctcctttttattttctcaaaatgcattttcagaccaatggaacttatctcttaagctctaatgatatttattttatatctctaggttctctggtgttggatgcatatatatttataattgttatatcctcttgctgaattgatccctttatcatttatataatggccttctttgtctccttttatggtttttgacttaaagtttattttgtctgatataagaatagctactcttgcatgcttttggtttccatttgtgtggaatgtctttccattccttcacattcagtctttgtgtcttttcaggtgaagcgagtttcttgagggcagcatatagccaagtcttgacttttttttttaaatccatttagccagtctatatatttgatttatttatttattatttttttgagatggagtttcgctcttgttgcccaggctggagtgcaatggcacgatctcagctcactgtaaactctgcctcccacattcaagcaattctcctgcctcagaatgttggcaagtagctgggattacaggcatgcaccacctcacccagctaattttgtatttttagtagagatggggtttcaccatgttggtcaggctggtctcaaactcctgacctcaagtgatccgcctgcctctgcctgccaaagtgctgggattacaggcataagccaccatgcccaggcagtctatatttttaaattgggaaatttaagccatttgtcttcaaggttattgttgatagtaggtgagaacttactcctgtcattttgttaattgttttttgattggtttgtatatcctttgtccctttctccttctcttgttgcttatctttgtgatttggtggttttctgtagtaatcatgtttgattctttttttatttcctttcacttgtgtatctgctgtaccagcaaattttggactttcatgtgtttttatgatgataggtattgtcttttcacttccagatataggattcccttaagcattccttgtagaattggtctagtggtgatgaataccctccatttttcttgtgtgggaaagactactactcctttatttctgaaggatagctttgctgggtatattacccatggttggcaggttttttcttttagcacatggaatatatcatcccattctctcctggactgtaatgtttctgctaagaaatctgctgttagtctgaaggggctaatatgtgacttgatgcttttttgttgctgtttttttagcattttctctgtctttgacatttgataatttcactgtaatgtgcctgagagaggatatttttgggttgaatctatttgaggatctttgagtttcctgtgtctgaatgtctatatctcttccaagacttgtgaagtttttgactatttcattaaattggttctctttgcctttcctcatttcttctccttctggaactcccaaaattcaagtatttgtctgcttgatgttttctcatatatcatgtaagctttcttcattaacatttcttttttttcctttatttttctttctttttgactgacaagttatttcaaaagacttgtcttcaagtttagaaattctttcttcagcttgatctagtccatttttgaagatcttatattttttaatttcatttattgaattattcatttccaggatatatgtttgcttctttttatatgtatatatctgtctatctgtttaatttcccattcagattgtgaattgcttttctgatatctttgttttgtcacccgtgttctcttgcaatctccatgtgttccttgagatctttattttgaaatccttttcaagcatttaataaattttcttttctttgcgttctgttactagagaattatttgtgtgtgtgtgtgtgtgtctctgtgtgtgtgtgtgtgtgtgtttggaggtggtgtgtttccttgctttttcatgtttcttgtgtttttatgttgatagctgtacatctgatgtaacagatgcttcttccaattttatggagtagctctcatagggaattactttttcctgtagatgtatctgtagtgtcagtgggtagggtattttgcctttagttctgggtgggtaccatagtgtagtcttcatattatttatttgaccgtatcaatgccagtggtatctgtgaatgccccagtggctttggctacaatttgtgaggttgtggtgagactttgctggggactggggtgaccagtagctaggctggctggtcctcaggcccttgggcaaggtacatgggcagtagagcccctggtgggtcagtcctcaggcccccaggtggtggggaacatgggtggcagtggcagcaggcctggtaggcttgtccttggacccccagggggcagccactagtgggggcagcagtgggtcctctgtcaagctagtccctaggtggaacatgtgagcactggcagtggcagcatgggcccctggtgagccagtcctcaggcacatgagcagagaagtggcagcagtgggccaggtgggccatgggtaccagccatgacagtggcatgggtaccagcaatggcagcagcagactctggggaggtctgtcattggctttcaggtggtgcatgcacatgggtatacagcagctccattgctggacaagctgggtctctgccagtggcaatggccctgggcaggcagctctcagtctctggggagtgcatgcctctgctctctatgtcctgggagcagcctccttgatgtgctggactgtttgttcccaggatatagtgcactgtgtgggctcaggtacccaggaacatggccacatggctgaatccagttggtgtcacaacacttctgcactctgaggagatgtcagcagggccctagaaatcaggacctttactttttagcacacacagtttttaaaaatttataattcaacccagtttattatatttacaatttcctacgttttaaagtattgaatagatgacttacgaggtacaaaatgaattttcagagcaaagttggagaactttcacttctcgttttctcttttttttttttttagatggagtcttattccattgtccaggctggactgcagtggtgtggtctcagctcactgcaacccccacctcctgagttcaagctattctcctacctcagcctcctgggtagctgggattacaggcacccgccaccacgcctggctgattttttgtatttttagtagagacagggtttcaccatgttggtcaggctggtctcaaactcctcacctcaggtcatctcccctccttggcctcccaaagtgctgtgattacaggcatgcaccactgcacctagccacacttctcattttcaaaacttaactacaacgctacagtgatcaaagcagtgtggtgatggcataaggacagatcatacagaacaatggaatagaattaagagcctaaaaataaacccttataatcagctgattaatgagaaaggaatagtctttttagaaaatagttctgggacaactggatatccacatgccaaatgaataaatgtggactccacccccccgaccggcctacttcacatcatacaaaaattaacacaaaatgcatcataagcctaaatgtaagaactaatactataaaactctcagaagaaagcataggagtaaattttcatgatcttggttagtcagtggtttcttagatataatgctaaaagcacaaatgataaaacattgataaattatatttaataaaaattaaaagcattcaacttcaaaagacataatcaacaaagtaaaaagacaagccgcagactggaagaaaacctttcaaattcacgtatctgataaggtatttatatccagagtacatagagaactcttacaactcaacaatataaacacccacccagatgggtttacaggtgaattctagcaagcatttaggaaataaattatagtaattattttacaatctatctctcagaaaatagaagcagagggcctacttcctaactcattcctgaggtcagcattaccctaataccaaaaccaaatacactgcaagaaaactacagattagtatctctcatgaacataggtgcaggaattctcaacaaaatattagcaagttgaatccaacaatgtataaaaagaattataaaagacaaccaagtgtgatatatccaggaatgtaaggctggttcagcattcaaaaatcagttaatgcaattcatcatatcaacagaacaaagaagaaaaatcacacgattatatcaatacatgcataaaaagcatttgacaaacttcgatacccatgcatgataaaaactctcagcaaagtaggaatagatgggaatttccttaacttgatacagaacatctacaaaaactctacagctaaaatcatatctaatggtgaaaagctagaagtttgtacactaagatcaggaacaaggcaaggatgtcctcttcctttcaccactcttttcaatattgtactggaagtcctagctcatgcaataagataagaaaataaaactttgtttacagatgacgtgattacctatgtagaaaatccaaaagaataaataaaaaactcctggaattaataagtgattatagcaaggttgcaggatataaagttagtatacaaaagtcattcactttcctatatattagtaatgaacaagtggaatttgaaatttaaaaaacacaatgttatttatattagcaacccctaaaatgaaatactccggtacaaatctaacaaaatgaaaggtatacagactgtgaaggaagatataatgctgtctttgtttgcagatgttatgattatttatgttgaaaatgtgagtaataaagaaaaaggaaaaaaacaaaactcctgaaactaataaagtgattatatcaaggttgtaggatacaaggttaatacaaaaaaaagccagtcactttcttatataccagcaatgaacaagtggaatttgaaattaaaaacacaataccattaacactagtaccaaaaaagaaatacttaggtacaaatctaacaaaacatgtacaagatctatgtgaggaaaactataaaagtctaatgaaagaaatcaaattactaaatgggagctattccatgttcatggatactgtcaagatgtcacctctcttcaacttgatgtacagaatcaatgcagtttcagtaaagatgccagcaagctcttttttattatattgacaaattggttctaaaatttacatggagatgcaaaaaacccagaatagctagtttgaagaagaacaaagtcagaggactgacactacccaactttaaaacttactataaagttacaataatcaaagcagtggtattgacaaaagagtaaagaaatagattaacgaaacagaatagggagcccagaaatagacccacataaatatagtcagctgatctttgacaaaggagcaaaggcaatacaatggagcaaagatagtctttccaacaaaggatgctaaaagaacttgaggtcctatacttttcataaaaattaactcaaaatggatcagagatctacatgtaaaatgcaaaactatgaaagtcctagaagattacataggagaaaatctagatgaccttgagtatgatgatgactttttagatataacaccaaaagtatgattaatgaaagaaataattggacttcattgagattaaaaattttgccttctcattacaaatgagaaggcaagccacagactaaaagatataattgtaatagacttatttaaaatattcaaataatcttaaaacttaacaaagaagatagatatggcaaataagcatatgaaaagatgctcaacaccacatcattaaagaattgcaaattgaaacaatgagatacaactgcataccttttagaacattttaggggaatctcagtgtttctcatttacttaaataagttcttgctacagttttggtggtaatcctcacaggagtctgaggggactgattgcatctggagaatttgtggggaagcctcggaagcttatttcatgaattattagagtgaggagggaggttgagggagggagggaaagagaaggaagagaccaagaccaagaaaaaacaacccaaaggcaggtcttgtcgtatcttctagtccctcggctggacctcaaccaacccccagtgctcatctctgagcactaggaggagggactgtaaggaaaaactggtcacctgttctctttctctggaggccctttgttccagttgcacagcctgattcgctcttccatctgctcccattagtcaacgaaggcctggtgtcaccatcccaggaacctggcttctttcgctgggctccctccagtcagcaacaccagattgctctttcttcccacttagccctgcccccttttgaatctcatataaagttctattttctcttctaattctcaggttatttgcattacagccacaggtgtggctgtaaaaaacttggcctttggattgtttgggcttgaatcctgtatttgctacctgtggttcagtttccctacctgttaaaaatatttcttttgttgtgaggggtatgtgaagtacatacatggcgcctcgtaactggtgggcacacaacaatggtggttatcctcaggagtagagagtatcccaaacagtgtggggctggaactgtgtaattcttcacgttcactgcacaaagcaccaggttcctgggttccttcctcagagaatctcatgtagttggtctggggtatagccctggcataggggtttttaaaagtttcccagaccagatgatcctgacagatggccaagactgagaaccataggtgtgcgggactaatcaaggatggaaatctctttgtgcactttatctaacccgcctcaccccctagatcctatgcctttgcttagccctggtcttgacccccaggcacactgtgcctccaatgctggacaggccctcatttcactttctgaagtgtatttctttctccaagcccgaaggcctgtctgaacatttggtaactgacctactcagaatgaagcaggactcactttgtcttttttaggtagaagctgactccgtgttggattacattttttctcacaatcactttttctttggtatcatattggtgcttatccttttcctccctgaatttctatagacagaagaccagactcactggctttcgtgcactaaaaatctaaaccactggagtttacatggaggagcccaggtgtaaattaatgtttgggcaaagcaaggcttctccccagggtaatcaaaatccccagggctagagataaggaagggaggggtgaggtaggaagaaggctgtacagctgaattaggtaggatgctttaggctgcaagtaatagaaatgccaactcaaactggtttaacccaccatcaattattgtctcacctagcatatgtccagaggcagtgtgtcccatagtcacatagcttgttagcttattagctgtgtggccttgtgcaactgacttagtctcaatttcctcatctgtgagaaggattgttgcatatcaaattagataatataagcaaaattcttacagcactctatagcataaagtaagtgctttataagtgttagcaactgtattggtcagtcattgctccataacaaacaaatgcaaacatctcagtctacaacaattggtatttccttctcatgtgtctacaggttggcaggatttggttgggccactctaattcaatctgtgtgtggctgggcatggtggcctatgcctgtaatcccagcatttggggaggctgaggtgggtggattgattgagcccaggagttcgagaccagcctgggtaacatggtgaaaccccatctctacaaaaaaaaaaaaaaaaaaaaagcctggcatggtgatgtgtgcctgtagtcccagctacttcagaggctaaggtgggaggatcacatgagcccaggaggtcaaggctgcagtgagccatgattatgccactgcactccagcctgagtggcagagagagaacctgtcttaaaaaaagaaaacagaaaaaaaaaaaaagactcacaatctgtgtgctgctgggtttagctcttgtgctgatgggctcaggtttgcctcacacatgttccttctggtctcatggcagcactacaacaggcaccagaagaatgctttcccacagcaatagtagaggcacaagacagtggaaaaacacaaggccttggtcaggaactgggacattgtcccacacgcgcgtgtgtgtgttcgtgtgtgtgtatgcacacatacagggcagaaattatgagtgaaagagacagggatggaggaaggaatgggggaaggaggagaggagtaggtaaggaaggaatgcacgtcaatctgagtaaagggtatataggtattctttgtactgtttttatttttgcaacttttctgtgtttacagttatttccaaataaaaaataagcagaaaggaaaagctaatcatctccccctattccagtcccccaggcatgtatccttccgtagcttctccacacctacacgaacctagacgattccttccacaccttccccacacccacacgaacctagatgaattccttccacaccttctccacacccacacgaacctagacgattccttccacaccttccccacacccattctccacacccacacgaacctagacgattccttccacacctccacacccacacgaacctagatgaattccttccacaccttccccacacccacacaaacctagacgattccttccacaccttctccacacccacacgaacctagacgaattccttccagaccttctccacacccacacagacctagacgattccttccacacctccacacccacacgaacctagacgaattccttccacaccttgtgcacacccacacgaacctagacgaattccttccacaccttctccacacccacacgaacctagacgaattccttccacaccttctccacacccacacgaacctagacgattccttccacaccttccccacacccacacagacctagacgaattccttgcacaccttctccacacccacacgaacctagacgaattccttccacaccttctccatacccacacgaacctagacaattccttccacaccttctcacacccacacaaacctagatgaattccttccacaccttctccacacccacacgaacctaaacgattccttccacaccttctccacacccacacacacctagatgaattccttccacaccttccccacacccacacagacctagacgaattccttccacaccttctccacacccacacgaacctagacgattccttccacaccttctccatacccacacgaacctagacaattccttccacaccttctcacacccacacaaacctagatgaattccttccacaccttccccacacccacacagacctagacgaattccttccacaccttctccacacccacacgaacctagacgattccttccacaccttccccacacccacacgaacctagacaattccttgcacaccttctcacacccacacaaacctagacgaattccttccacaccttctccacacccacacaaacctagacgaattccttccacaccttcctcacacccacacgaacctagacgattccttccacaccttccccacacccacacagacctagacgaattccttccacaccttctccacacccacacgaacctagacgattccttccacaccttccccacacccacacgaacctagacaattccttccacaccttctcacacccacacaaacctagatgaattccttccacaccttctccacacccacacaaacctagacgaattccttccacaccttcctcacacccacacgaacctagatgattccttccacaccttccccacacccacacagacctagacgaattccttccacaccttcctaacacccacacgaacctagagaattccttccacaccttcacacccacacaaacctagacgaattccttccacaccttctccacacccacacaaacctagacaaattcttatacacttaaaatgggattttgttgttttattaaaatgcagtcattctctatgcattaattattgtgcagcttgatttttctcctttttttttgttaaatcttcctccgtcatccaggctggagtgcagtggcgtgatctcagctcactgcaacctccacctcctaggttcaagtgattctcctgcctcagcctcctgagtagctaggatcacagagttgtacgataatgcctgtctaatttttgtatttttagtacacacgggatttcaccatgttggccaggctggtcttgaactcctggcctcaagcaatctgcccaccttggcctcccaaagtgctgggattacaggcatgagccaccgcatctggccgatttttctcttcacaatacatcatagacatcccttcaggccaaaagacatagatttaatttacttttaaatagagctgcatagtattctacatgtgtgtaagtatcacagtttcttcaaccatcccttattggttgatactctggcagtttccagttttttgcctacaaataaagcagcaaacagtatgcttgcacatataacctgttgtattggtgccaaatccatgaatcacttctgaaagtataattttaatcagagtcaagtagcaccacagatcctccaagatccattctgctcaacactcttccacagtggctattaaggctggtctccagctgttcacaccttatgtccagtgcatgcaagcctggcatttttctggagggccagcagatcttctaagaagctgggcacaccgagtttctccttgaacgtgaagagactattgaaacctgtctgctatcttttggtaggtccctcatatttggcaggtgagtccagtattactatatgttcaccaaacttcacagagcccttctcatctcactcatgagcgtctggtaattataactttaaaaaggttttgttagggctgggcgtggtggctcatgcgtgtaatcccagcactttgggagaccgaggcgggcagattacctgaggtcaggagttcaaaaccagcctggcaaacatggggaaaccccatctgtactaaaactacaaaaattagctgggcatggtggcgggtgcctgtagtcccagctactcaggaggctgaggcaggagaatcacttgaacctgggaggcggcggttacagtgagcccagaacatgccactgcactccagcctgggcaacagagtgagactctgtctcaaaaaaaaaaaaatgttttgttagaagttttaggcagggcccaggcttctgtagtggggggccacatatggtccacaagtggctgattggatgctcaagtggagtccatttccagcacaattaatttggctgagatcatggttttgattttcacatgggacacactgcctcaggccaagaataataatgaacacttatggaaagctgcctcattcaggaacccaattaagcacttttacaaagaccatctcatttaatttcctccacaactctgtgaagtctaagagttgtattaccccattgtttcacttttctattacaacaataattctgtataaaaacaccccaaaacctagtggttcaaaatcaccacctattatttgcttgtggttctgtgagtaactgaggctgggctcaactgggcagtccttctggtttctgctgggcttcttcctcttgtgtctgtggccagctacaggtcagcaaggcaacttggcttctgggagttggctggctgttggctggagagatgggaatttttgttctgtgtggtctctcagcctccaacaggctagcctgggcttatttacatgtaggggggtggaggtggtgttgagagtgggagacaggtggaacagagagagaaaggcaacagaaaggccaaggcttgtggaggtctgcctcaaaactggcacaacatgactttgccacattctttaggccagaacaagtcagaaggtcagcccagatttaaggagtaggaaaaaagacaccacatcttgagaggagctgaaaagtcacactgcgaagggcacgaatacaaagcaaagtggccgggtgctctggctcacgcctgtaatcccagcactttgggctttgggaggccgaggagggcagatcgcctgaggtttcaagttcgggaccagcctggccaagatggtgaaaccccgtctctactaaaaatacaaaatttagccaggcatggtggtgggtgcctgtaatcccagctacttgggaggctgaggtacgagaacctcttgaacctgggaggcagaggttgcagtgagccaagatggtgccagtgcactccagcctgggtgacagggcaagactctgtctcaaaaaaaagaagagaaaaagtttgtggccatttttgtaatttactttgctgcctcctgtttttgtaaataaagttttattgggacacagccacacccactggtgtatgtatcatctatggttcctttcatgctacagtggcagagttgaatagtagcaatagtgaccacgtggcccgcaaagcctaaaatattccctgtctggccctttctagaatacatgtgctgccccctgccctgccctgagttctctgaagcctctatccacatggctatgctgtacctttaatgcaaactgccctgacctggggaaaaatggtttctgtggatgttgtgtgtttaaatgcctggactagtctcctctctgtgtgaaaacacccttgactcccacagatttccttggccttcatggtgatccctgtgggcccagtctttggtagtcctttgcttggaggaggtggcatgggtttgagcttctgatctttaagagtagggacaggtaagacgagagcagacaggccctctgggaattcaaggcccacacagagagaagctgcctgatgcctgatccctccctgccacgcagccgggcacagtcacaaaacagtcctgtttgaagtgggttattaagtattggccccagggccaggccctggtaagcctgccatttcatccagcacttttcaccaagcttgctgttgaagattactcaggaaggcgccagagacacgatgatgagatccaattattatttaaatctagagctggtcttagcaggctgaggtttactgggaaatagaccataacaaatagaagtattgatgagtttggccgggcgcgatggctcacgcctgtaatcccagcactttgggaggccgaggtgggcggatcacgaggtcaggagatgaagaccatcctggctaacatggtgaaaccctgtcgctactaaaaatataaaaattagccgggcttggtggcgggtgcctgtagtcccagctactcgggaggctgaggcaggagaatggagtgaacccgggaggcggagcttacagtgagaggagatcgcgccactgcactccagcctgggtgacagagagagactctgtctcaaaaaaaaaaaaaaaaaaacaaaaagaagtattgatgagttcaatgtaaaggggaaaaagctcagtatttatgtacttaattggaaccacctatactatgtattaagccaaaagaacaagattcagaacagcatgtggtttgctaccatttatgttaaaagagggcaggggtattatattatattatatattttattatatatgcaaataatgccccctaaagatgttcacgtactgatccccagcacctgtggctgttacattacatggatggcaagtaggtattaagtttgttagctgacttgagatgcagaggttagctggggttatcagaaggcccattatagagtgaaagagggaggcagccccagaaagattacacccgccattgctggctttgaagatggaggaagacagccaggagctgaggaatgcaggcagcctccagaggctggaaagggaaagtccttcctgcagtctccagaaggagcgcagccttcctgaccacaccttgatttgagctcactgagccccatttcagacttcaggcctccaggactgtgagataatgaatttgtgttaatgtcaagcctttaggtttgtggcaatttatcacagtagcagtgggaagcatatatatatatatatagtctcacgtgtgtccatgtgaagacaccaccaaacaggctttgtgtgagcaacacggctatttatttcacctgggtgcaggcgggctgagtccaaaaagagagtcagcaaagggtggtgagattatcattggttcttataggttttaggataggcgatggagttaagagcaatgttttgggggagggggtggctctcacaaagtacattcttaagggttataaagattataaagaatattgatcagttagggtggggcggaaacaaatcacaatggtggaatgtcatcagttaaggctattttcacttctgtggatcttcagttgcttcaggccatctggatgtatacgtgcaggtcactggggatatgatggcttagcttgggctcagaggcctgacatatatatatatatgtagcaggaggttctcctcaagcaactaatctctaggcaatcagccttactgttattttatttgtttgtttttgttgagacggagtttcgctctgttgcccaggctggagtgcagtggcacagtctcagttcactgcaacctctgcctcctggattcaagcgattctcctgcctcagtctcctgagtatctgggactgcaggcacgtaccaccacacccaggtagtttttgtatttttagtagagtcggggtttcaccatattggccaggctgctctcaaacttctgacctcgtgatcctcctgccttggcctcccaaagtgctgggattacaggcataagcccttacggttattttaataagcccttactgttattttaataactgacttgccaagtaccgggaaaaatcctccttgtccaatagcattaggaggctgttccttaccaagggccatgttgagttttaaagctcaatatgtagtaaggccaatctccagatcttcactattcaaagtgtggtcatcgcctgagggctttttagatatgcagggtatcagccctacaccagtccttctgaatcagaatctgtactttaataagatgcagtgattcgtgtgcacactaaactctgagaaacactgatccagcccatcttccttgcctaggtgcattaaaagaataccccacactctttaatcaatatgaaaataaaggcatgattatttccgccaaatttttctttctcctgcctccaaattgttctctgttgccacataagagtctcttcccccttcttttggcaaaaattcaaatgatcatcttcagaagtcacctttctcctgataacttccgatcacttctgttcatgtctcccacagcaaattgtcctaaggaattaacacactttcccttctccttgtgaagagacagcctgagaccagagactgccccttctcctgatgagaagatagcctgaggccaaagactgtcccttccgtgtccctccctactcctcaagcagagcctccactcttcaaacttaacggtctcaactgatttcctcaatgacttgatttctgtacggacttttatttgtgacatcaggtttccctaaacatccaagggcatactgggctccttaaatgacctcacccaactatgacgtggcacgaggtgaaacagtttcccaaaagaacgcttgtgcctccagaccagaattgtcacacctgaagttgtttatttgagcagccttgtcattgggctttccaaagcaggctttgtacagtggccacaccatggtcttgcatgatacttgaatttggaaggttcctggtagacgtagaaacggcccagactgcctgttcagagctaagcatcatggtaagttaaggtacattctctcctagtacaccttgagttacctaataaaataatccagagcagccaggcatggtggctcacacctataatcccagcactttgggaggccaaggtgggtggatcacgaggtcaggagatcaagaccaccctggccaacacagtgaaaccccgtctctactaaaaatacaaaaattagagggtgtggtggcgagtgcctgtagtcccagctactggggaggctaaggcaggagaattgcttgaatccgggaggcacaggttgcagtgagctgagatcacgccactgtaccccagcctggtgacagagtgagactccgtcaaaaaaaaaaaaaaaaaaagatctacagctgagcctccaagaagtagactgagggttgcattttcttcatctgacatttgaaactgccagtgaagtaaggaagggcagctcttttccacaagcaaacattacctctctatgtctatcttgtagtggagacctcaaatgtgtctgtcttggtaagaattcaggaagcagtagagctaggtacctgtggtagatatcactagaaacttcaatttcaacaacgtggtgagtaggatataagctgttgaggttctgtggccatatccccacccaaatctcattttgaattgtagctctgacaattcccatgtgtcatggaacggacctggtgggaggtaattgaatcacaagggcaggtcgttcccatgctgttcttgtgatagtgaataagtctcacgtgatctgatggttttataaagaggagttcccttacacaagagctctctttgcctgcctccatgtaagacgtgactttgctcctccttcatcttctgccatgactgtgaagcctccccacccatgtggaactgtgacccagttaaacttctttcctttataaattacccaggctcgagtatgtctttatcagcagtatgaaaaaggactaatacagcagttaacatgaacaactcatactccagaacattccaccctagattttcagagtaaaatccaagagaacagtggaatcataagggtgggagagaagttcacggggcaggaggggaccaagactgggacagtatatttcatggttatatttctacaaggattacactggggctcctcttccttagtactgaccttaaccgttcagatcacgattaaaacatttcttatcatcccaaggcctatggatttgggagccccacaacagtgtaaagccctgagttaacaaaatatcatcatttataaaagctctaaactaggcacagcaaccgtatttttttggttttgttttttttaatccagattcagaaattagaagcctctttttaaaattgaaatgggcccaagtggttaagtcatgttacttggctcatgtgcctattgttcttgctatgaaaactagcaacttgtggcaatgaacataaagcttttttttccaatagctttactgagatacaatttatgaggcataaagtttacccattttaagtgtagaagtcaatggtttcaagtgtatttatggagtcatgcaaccatcactgtcattcaatttcagaatgttttcttccctccatgaacccactagcagattcgcagtcactcctcatgaccaccccgacccactcgggtaatagggagcctttgactagccattcactccatttccaaacagtttttcattcaagggcagtgtaattttcacagcattgaacaaaactttcaccggaaagagacagaggcaaagcaccaggctgagctcctcagagaaacttgctcttttggttacacttacttcatccgcagctgctcaatcagagactctccctgcccctggcagtccaacttccctcagcaggagtctgttttcaggctgcagggctacagaatgtggtcattccccccaccttaaaatattcacataaagcaaatgcgtcctctctgggtaaattctgagccacgggggcaggcgaatgtgagtgtgtatatgtgtgcgcatgtgtgcatgggagtgtgtatgtgtacatgtgtgtggtcgccaacagtttgcagcacaaacattcacatcgaatgtaaatcttgctggtctccaaagccctcacctggggaaagtcaccatactgacgttgttttacattattaatgacagggatgcaatgagaaaccttagaaaaatccagaaatatctgaaagctcaaaccccacagtagtgttatgaatatttgtaggcaaagcactcagttctacaacttattttgcacacttcttataattcatataatgcattcaatatcaacttatgggtccacatgtcagcttgattatgctgaagagcaagtgaacctctaaaccaaactttttgttcagaaggaaaagctcatccaagttcttcctgtacttgaggagccaactaccactatctttttgaaacttgacaagtggtaatttgtccagggatttagctatcaagccatcgaatcacagaagcagtatcagccaaatgatgccataaactgttctttttgatcataagactgggtttcagataattatcatgtaatgtatacactacacgttttgtttcagtagctcaattgcaatttctaatggagctttaaaaaattgatacatcatggcctggtgaggtggctcacaccacaatcccaacactttggagggctgaagtgggggattgcttgaactcagtcattggagaccagcctgcacaacatagcgagacatcatctctactaaaagtaaaaaataattagccagatgtgatggcatgcacctgtagtcccagctactcaggaggccgaggcaggaggatctcttgagcccaggagatcaagcctgcagtgagctgtgatcgcaccactgcactccagcctgggcaacaaagcaagactctatctcaaaaaaaaaaaaaatcattacatcaggtagctgatttctagagcaaacaaaaagtttaggggtcccacagagtgctatagccacgtgtgtcagactgtcactctccatcaccctctctgtgcgctcctctgactctctaaggggccagcttgaccccagccctggacagggcccacaaggagtcataagacaagatggaattggtggcagaggttccagtgaacccagatcgacccatcacactccagcctgggccacagagtgagacctgtctcaaaaaaaaagattgttgttgaggctgaacacagtggctcacgcctgtaatccccccactttgcgaggtcaaggtgggatcacttgaggccaggagtttgagaccagcatgggcaacatagtggagccccatctctacaaaaattttaaaattgcccaaaacccaaggtggcggcgtggccatcactggccaggatcacgggcacagtcctgcgctctgtggtggctcctcacagccctgctccagactcccgtgcaggcatctagtgggacacggcaaactcaggctgcaaggacatccgggcccagatgaggagagttttctgtgcttcccctacgacagcaacctgctgactgagagatccacctccaaaacccctcggtggtgttcttctacatggcccgcctgcaggcaagaagtgatggaatttatgttgtcatggaagttaatgtttcaactcaagaagagaaataacctatcgacattatctgatgacaaattacaagagtgtttcccatccccacagtataaaaaggttatttgcataggtgcaaaagaaaatggtttgccactggagtacaaaaagaagttaaaagctgtgggaccaaatgaccgtacaggaaaggtctcagaagaaattgaagacatcatcaaaaaggaatcacgaactcattagaacataacagaatatatctaaggatattccatgtactaatgtaaaataccatttgaaaacagggatctggaggatctccatgtttgatccatcttcaaccgtgctctgaagaaatatcgcacgtgggtgattcttgttttcagactataaaaataaactggtttaggagttaagcaatgttataaaagagggtgattacctagcactttgggaggccgaggtgggcggatcacttgaggttagcagttcgagaccagcctggccaacatggtgaaactccatctccacgaaaaatacaaaaattagccaggtgtggtggcacatgcctgtaatcccagctactcaggagtctgaggcaggaaaatcgcttgaggcagaggttgcagtgagccgagattgtaccactgcactccagcctgtgcgacagagtgagactctgtctcaaaaacaaaaaacaaaaaaacagaaacaaaaacaaaaaaagaggacgatgaggccctggaatgtgtgacaaatgcatgtgagtaccccttcggtaaacacttgaagctattattctcttgagttgatcttcagtgtttccttgttctggcaaaggatagatttgcagcttgcttgatgatgatactgatggtgctggtaaattgctctgctctgggttttaaaaaaatcagcttaatgagagtaagtaatctgcagacaattgataataacattttgaaactggaaagatggtatactgtttttagaggaataaatctatttgtggttaaaaaaataaataaaattagccaggtgtggtggtggcgtgcatctgtactcccacatactcaggaggctaaggtgggaggatggcttgagcccaggaattcaaagctgcaatgaactatgaatgcaccactgcattccagcctgaatgacagacagagactctgtgtctaaaaaaaaccccaaaagccaaaacaaaataaaaaaaatgtttgttgaatgcataataacttttgatactttccctcaaaatgcaagttaggaaatgaagacacagaacatccctccctctgtttctcctgagtgcattcagtgcatcccctcagtctatcctgtgcatctgatttatttgagaggctctgctctgggtggccccactgaagacagagcatttaccccactcagagttttcaaaaagttttcatatgcactttcccatttgatattcacaacctccctgtgagggcccatgtatctatccccatctcatagacattcattggaccttgctgggaacatagccaggaaccaacaaatgttaattactcttatttttcatgtcttctttcccatgtcttcaattgccaagctacattaattaaatttttgcctgtgacactttgtgcaatgaaacaaaggttgtaaatataaatcaattaatatttgttagacacttacaggcttgcaatgccccagccaccatataatagataccaatcagtaaataaataaataaataaggaagaaagggcagcttttgcttatggaagaattataattaatatgtgtagaaggaatgaggaaaatagaaaatcactgagaaaagcacagtaataattgttggactcaccaatgaattctaaaagtattcagcaaaagtttgaggaaaaacaggatatttgcagactcaagtgtgttccccaaaatgtttattaattacaaagagaaatatagtaatttcagagcagacaaatccaagcagatcagggagacatgactacaaagtttagtttactttatataaaacaaataggttaaagaaatatcagcaaacatttttgtcagtttttccccaaatcagatgtttcacagatgtgccatctgattgtagggagcacttataagccccaaaaatattgtaccaatgaggtgagtgataattcccattcttactgaatttcttcttgcctgccggctggcttctctaaggtttagccagttttttattttatgctgtgtaatttctcctttacatagattatatggaaacatctccatacagtgaagaatcataaattcctgtttcagtaaactccaaattaataacttctaaagattttatttacctgacaattgaatataattcagcctgatattgacttcataaacatcatcatggatagtagagaaaacatgctatcagagaaattaaactgttttcacaatcctgggtttgaagctcactgacctgagcaattgcctagaaaatctgagattctaaattttaaatttaatcaaatattttatgaaaccataagaacgcaagaaaaaggggatactgagaagcaaaaatcaaatgaaacaaaaaaaagcaaatagcaaaatagcagcaactcaaactatattaataatcacatcaaatataaatggactaaatagtcaaaaggcagagattatcaaactagttataaaagtaagagctaactatatactgtctattagagatgcaatttaaggttaaccaacccacatggctgaatgtccttacttgggaaagaatatcctagaatggccacatcttgggaactgagggacacattatcaaaattgagcagatttctgtaaaagtaaagggattcaagggaaggggacctacactttacctcttgatgggaggagaatcaaaaaatttgtggccattgaaaaaaactgttacaagggtaaaactacctatgtatacattggttatgaggattagaattgaacgtaatgcatgtattggacacatgaacgagaggttactagtataattattatggctgttaaaatagtgaatgattggaatgcagtctggtcaggttgtttttttagctttaaccatcagaacttcaatatcatgtggcatctcagcaggagatgttcagtagcttattgccttgggtcaggtgccccagaagcagactcttaattgcagagttgaatgtaagcgactcattaaggacatgctcacaggaaggctgatgtggaagtagggatgggcaaagcaaatgtatgctttcaggcaaagtcctgtggctccagcgtgatcctacaggggaactcaggagtgtgagttatgcctcagagtttccctgactccaagcaaaggaagtgggctgtcacacgcctgcatccttcagactttggccatgaactgccccagatagaggatataaactcacaggcacttctagcaacctgagtgtggaaaaagtggctccagtagcccgagaaaagacttccaagaagagtctctggtgtgagtcgtggggtgcatactcaagggagtacagacaaaacagttaaagggatctgcaagggtctggccagagccctggcagtgtctactgcacttattaatatttattatgctgaatagacattaggttggagactctcagctaacacccagcttgcctgctacagggcagggtcttctttcatgtttgttaggaaagaaatctaacatcttgacgggccaccatgtgtgaggccacacaataaacaatttaaaaaacacgacctcattcactctttagatggccttaggaagagagtttcatatccttctttgaaggatgaagaatgctctagagagacttaggatcttgcccaacgtcaagtagataataaatggcgaagctgagatttgtacgcatgtgtgtctggctccctggctgtttcctgagaacttgcttgggaaatagaaaacctttatgaaatcctcagagaccctgaaaattgtcttctcaaaataattttacaacaaactacagtgaacctatgtccattgctgctgtgttcattttctagagctgccataacaacaaactgggtggccgaaaacgatggaaatttgttttctcacagttctggaggccaggagtccaaaacccaaggtgttggcacagccgtgctccctctgagggtgctagggaaggaaatgctccaggcctctctcccggcttctggaagccttagtctttctggggcagtagctgcttcacgtgatcctctgtaatcacacagcgttctccctgtgtctccacaccattgccctctgcatgtatgttcaaatttgccttttttacaagggtaccagtgaccccatcttaacttagctaaatctgcaaagattctatttccaagtaagctcacaatctgagatactagagataggatttcaacatatgttttttgaggaatacaattcaacccatagcagctgcccacaagagaccatgtctctaaataaataaacaaaacaacaaaacaatgctttctttacagaaatctctctcagtggctgggaagacagtataccaaaagcccaggtttaacttgatttgatgggtgatcctaggaatttttgttctttgtatgcaacttcctattggctaataggacccaaaaaaaatccatttcagggactcagagggtaggcggtgtctgtgtatcagcctggccttatgccccctcggagccccaggctgactcatggcagggttctctcagctcagccctcgtgctttctttgtttctcttgttgttgagcacagcctggttttcctgccggctcccacagagagtgtgccctgtcccacatctctgacgagctgacaatacagagctgcaggctggagcccctgaggactgagagtatactgacctctaacttcttcacccttgtctgcaagaaaagaaagcctctgagctgcagggtggcaggtcctggctgtgtcatgattcttgaatcacagatgtttttcttggctgaatgccggggccaaactatccagggaacactggtggggcagggaaaaaaaagaagaaagccctaagtttgttttctttgctgtctttttcatccagatttaaacagtgtcaaggctaagactgagcagatctagggacaaacagcaacaaccaccatctggaaaatcagcgggcaaggtgctctggctaggccagcaggcacagcagcccttcagaggtggtgacatttgactctcggcataatcccccgtgtcctgccattcttttgcttacctttcccattctggggtctgcactaaggtctggaattgagagctgctatataggacctgatgttagcaggcgtgtgccccaactgttttctccagtatcctaaaagaagagaaaccccaagccagctacatggataattcttctctggccaagaaagaaaaatgctcgcatggattatgcattttcagaaggaaccgtgcattctcagaagggtgtttttcctttgccaagctctgtgctgggtttttcctgtgctgggctcagacagtgtttggcacagagtagtcattcatttcacaagtatgtattgagcacgtgtgatgtattgttctaggtgttacttaaatggacaaaagagtaaaataaaaccatagtatctaaactaattacagagtttctaaatgttggtgacatagaggcctgggacattattttagctctgtcatgtagagatcaatagtgataatttgttttgttcatgattaattagacagcaatatcattgatgcttctattccagagctgaggcaccttatggtgccagtaaggagggaaatgccaggaaaaaaagggtgaggacagtcaaagggcacaggaatcaacctgaaagagctcctaatggccaaagctgaagcaatttaagacttaaaaaaagtaatgttggattataaccatagaataaacatccatgagtccatactgataccagtaagtttttaaaaatcagtaaataaataaataaggaagaaagagcagcttttgcttatgtgtagaaggaatgaggaaaatagaaaatcactgagaaaagcacaataataattgttggactcaccaatgaattctaaaactattcagcaaaagtttgaggacaaacaggatatttgcagactcaagtatgtcccccaaaatgtttattaattacaaagagaaatatagtaatttcagagcaggcaaatccaagagacaccaccttaactaggtgatcaaagatactgagaagtgacagcgtgctggcagccctcacagccctcgctcgctctgggtgcctcctcggccttggcacccactctggccctgcttgaggagcccttcagcccgccactgcactgtgggagcccctttctgggctggccaaggccagagctggctccctcagcttgcaggggagtgtggagggagagacgcgagctggaaccagggctgcgcacggtgctggcgggccagctggagttccgggtgggcgtgggcttggcgggccccgcacttggagcagccagtcggcgctgccggctccgggcaatgaggggcttagaacccaggccaatggctgcggagggtatgttgggtcccccagcagtgccggcccaccggcactgcgctcgatttctcaccgggccttagctgcctccctgcggggcagggctcaggacctgcagtccaccatgcctgagcctcctcctcctccgtgggctcctgtgcggcctgagcctccccgacgagcgtggccccccgctccacagcgcccagtcccatcgaccacccaagggctgaggagtgcaggcgcacggcgcgggactggcaggcagctccacctgctgccctggtgctggatccactgggtgaagccagctgggctcctgagtctggtggggacttggagaacttttatgtctagccaagggattgtaaatacaccaatgggcactctgtatctagctcaaggtttgtgaatgcaccaatcagcaccctgtgtctagctcagggtttgtgaatgcaccaatcaacactctgtatctagctattcgggtggggacttggagaacctttgtatggacactctgtatctagctaatctagtggggacgtggagaacctttgtgtctagctcagggattgtaaatgcaccaatcagcaccctgtcaaaacagaccactgggctctctgtaaaatggaccaatcagcaggatgtgggtagggccagataagagaataaaagcaggctgccagagccagcagtggcaacctgctcgggtctccttccacgctgtggaagctttgttctttcgcttttcgcaaatcctgctgctgctgctcactctttgggtctgcactacctttatgagctgtaacatacgccgtgaaggtctgcagcttcacccctgaagccagcgagatcgcaaacccaccggggggagcgaacaactccagacgcgcgcccttaagagctgtaacactcactgcgaagggctgcagcttcactcctgagccagcgagaccacgaacccaccagaaggaagaaactacgaacacatccgaacatcagaaggaacaaactctggacacgccgcctttaagaactgtagcactcaccacgagggtccgcggcttcattcttaaagtcagtgagaccaagaacccaccaattccggacacaatgccatcaccagtaagaagatacatcaacatgatgttccctcagtaggatgcagggagaaggaacaatgccacctgtggtttcctgcccaaaatgaatagactccatctaacgccgagacacacccacgttgagagatattctacgaaatcagtgaccagtacttttcaacagtggcaaagtcatgaatgacaagggaagactgagggactgtcacaggttttaggagattaaggagacatgacatctatatgtgatagtgggaaaactgttgaagcccaaataaagtctgcagctatgttaatagtatagtacccatgtccatttagaatttttttttttttttttttttttttttttgagacttgagactctctccatcacccaggctggagtgcagtagggcgatctcggctcagtgcaagctccgcctcccaggttcacgccattctccttccttagcacccccttccctcttccccacccccccacccccgccatcaactgggactacaggcacccgccaccacgcccagctaattttttgtgtttttagtagagacggggtttcactgtgttagccaggatggtctcgatctcctgaccttgtgatccgcccgccttggcctccaaaagtgctgggattacaggcgtgagccaccgcgcccagcctagaaaaaaattttttatagtaaataatcaaacaagaatgtacatttcttaattttaatgtggttataccagatgttgatattgggggtaaaggagaactctactatctgcaacttttctgtgagcctaaaactgttctttttaaaagcaagaatacatttgacgctcagtgcagtgtctcacacctgtaatcccagcagtttggaagggcgagggaggcagatcacctgaggtcaggagcctagccaacattatgaaaccctgtctctactaaaaatataaaaaccagctggacatggtggcaggcacctgcagtcctagctactctggagactgaggcaggagaatcccttgaacccaggagatggaggttgcagtgagccgagatcactgtgcactctgcacttaactttttcagaacaaaatactgtataagccacactaccccatacaaagaactgtaattatttgtaattcttatgaactaggtattcatttgtacaaatctggaaagccagtgggcgacagagtgagactccgtctcaaaaaaaacaaacaaaaaaaggatacatttgaaatcaggtctattttagattccatagaaaaagatttacttttaaagattcagaatggccgggtgtggtggctcacacctgtaatcccagcactttgggaggccgaggcagccagatcatgaggtcaggagatcgagaccatcctagctaacacggtgaaacctcgtctctactaaaagtacaaaaaattagccaggtgtggtggcgggcgcctgtagtcccagctactcgggagactgaggcaggagaatggcgtgaacccaggaggcggaggttgcagtgagcggaggttgcagtgagccaagattgtgccactgcactccagcctgggcaacagagcaagactccctctcaaaaaaaaaaaaaaaaagattcagaatgggctgggcgtggtggctcacgcctgtaatcccagcactttgggaggccgaggtggcagatcacctgaggaccagcctggctaacatggtgaaaccctgtctctactaaaaatacaaaaattagccaggcatggcggcacccacctgtaatctcagctactcagaaggctgaggcaggataatcacttgaacctgggaggcggacgttgcagtgagcggagatcatgccattgcactccggcctgggcgacagagagagactccgtctcaggaaaaaaaataaaaaacaaagattcagaatgatctggttttataaagcatgtgtttatcatgaacttggtgtatttaagagcgtaaacccgtgtgtctgtgaaaggctaaaccggctgtcaaggtaactgagcctttgttcttgctttgcccctttctgactcagcattaccaggtcatcttggctttccagatttgtacaaatgaatacctagttcataagtattacaaatgattacaattctttgtatgggggtaatgtggcttatacagtattttgttctgaaaaacaaagtaatacaaaaactagtcagtggtgtgaattttgtttacctgaaatcagatgtcatgttgatcacgtaacttcttctggcctaacattgacgcattgatatcctcagaccaggtccagagaggccacttcccataataccaggctttcattactggcaccaaattggtggggagaaaaaagaaagaagggatttctttctactaaataaactcttaggaccttctgagagaaaggatcaaatctcaggtaaccagaaaggtcactgtgattatgaaaatcatagcaaccaatggttaagcagaaatgtagatgacgccatttctattgtatccatgtaactactgagaagagttaaatatttcctacttctactgtctgtgtacttctcaaagaaacctttttttcagttgttttttttttttttttggagactgagtcttgctccgtcgcccaggctggagtgcagtgacacaatcttggctcactgcaacctctgcctctcgggttcaagcgattctccctgcttcagcctcccgagtagctgggactacaagtgcgtgccaccgtgcccggccttttagtcttttttaaaaaaaaattttgtatttccatagtttttttgggggggaacaggtggtgtttggttccatgagtaagttctttcgtggtgatttctgagattttggtgcacccaccacccgagcagtgtacacggaacccaatttgtagacttttatccctcacccccttcccaccctttccccctggagtccccactgtctattgtatcattattatgcatttgcgtcctcatagcttagctcccacttacgagtgagaacatacgatgtttggtttttccattcctgagttacttcacttagaatcatagtctccaatcccatcaaagttgctgggaatgccattaattcattcctttttatggctgagtagtattccatcacatatatataccacagttcaaataaacctttatttttaagaatgctgtatttctggccaggcacagtgactcacgcctgtaatcccagcactttgggaagccaaggcggatggatcacaaggtcaagagttcaagaccatcctagccaacatggtgaaaccccatctctactaaaaatacaaaaattagccaggagtggtggcatgtgcctgtagtcctagctattagggaagctgaggcaggagaatcacttgaacccgggaggcggaggttgcagtgatctgagattgcaccactgcactccagcctgggtgacagagcgagactctgtctcaaaaaaaaaaaattgctgtatttcttaaccaggcacagtggctcatgtttgtaatcctagcactttgggaggccgaggcaggcagatcacttgaggccaggagttcaagaccaacctggccaacatggtgaaaccctgtctctactaaaaatacaaaaattagctgggcgtcgtggtacatgcttggaatcccagctacttggaaggctgaggcatgagaatcacttgaacgcaagaggtggaggttgcagtgagccaagatcatgctactgcactccagcctgggtgatggagtgacactctgtctcaaaaagaaaaaaaagaaaaatgctgtatttttaacaacatgtgctatgtgttctttcttggtctatgaataataacccttattgtgtagggaaaatgtggctgcagccagggtcaccatcgacacttgtgcatactgtgcactacaaaatgcacccagctgagggacaagtaggggctgacatctgtcttcctctctgctccccacgctgcatgcctgtggggctgtaactacccagaggaatgcatgtctttttctaattacacaaaggtgccaactggctgttagctctactcgtaggtgtagtgtatgtgtaatggactggatcagcaaattgagagagagattacaagttcagtgcagcaaaaggcattgtggtgatctatttgaaattctttaccatattatgaaaaatattcctctctaaatctagtgttttcattgaaaaattcatactctctgccataccagaaacctactgtcactactcacatattcttcagaaatttcctgaatacatccaaatatatatttttgtacacacacacagccacagccacacatatattcatttatgcaaatggaagtttgctattttatcccttgtttttttaaaaacttcaagatttttattattgtggtaaaatatatataacataaactatatcattttaataatttttaaagggtaaaattcaatagcattaaggacatttacatcatttgtgaaactctcatcactatctccacaactctttcattccaaactgaaactctgtacccattaaacaataactcctaatccctccactccatccaccactgtttttctttctgtctctattaattagtggcagaatttactttctgccactacatacctcatataagtagaatcacacaatatttgtccttttgtatctgccttatttcagttagcataatgtctttgaggttcattcatgttgtgggatgtatccgaatttcatttttttttcaggctgagtaatattctattgcatgtatataacacattttatttatccattcacctgtcaatcaacacttgagctgcttataccttgtggctattgtgaataatggtgctgtgaacaggggtgtatgaatatctattcaagttcctggttccaagtttcggggtacatatccagaaatcatatggtaattccagctttaattttttcaggagccaccatactgttttccacagcatctgcaccattttacatttctaccaaccaacaatgaacaaatctaatttgctcacatcttcaccaacacttgtattttgttagtagtcatcctaatcagtgtgatgtaatacatctttgcggtttttatttgaatttctctaatgattagcaatgtcaagcatcgtttcaggtattaattgtggctatttgtgtatcttcttcagagacatgtttactaaaatcttttatccattttttacttgggttggcttttgagttttaggcatttattatatattctggacattaatcccttgtcagatatatggtttacaaatattttctcccattctgtcagttgtcttttcactctgttgatagcatactttcatgcacagaagttttaaattttgggccgcgtttagtggcttatgcctgtaatcccagcactttgggtggctgagatgggaggtcaagggttcaagaccagcttggtcaacatagcaagatgcccatctctataaaaagaaataaaaaagaatttaaaaaaaccaaaaaaataaatttttaattttgatgaatcccaattcgtctactttttcttttccttctttccttcctttctttctctttcttgcttccatttcttttctttctttctttctccttccttccttccttctttccttcctttctttctctttcttgcttccatttctttccttccttccttcctttttttctttcctgagacagaaagggtctcactgtgttgtccaggctggagtgcagtggtatgatctcagctcactgcaacttctgcctcccaggctcaagcctgatgtcatgtccagaagcacaaacaactaaatcattaccaaatctaatgtcatgaagcttcccccctatgttttattctaagagttttagcccttaaattcaggcctttgatcaatttgatttaatttttgtacaggtacacctgagagatacagcagattcggttccagaccactctaataaagcgaatattaaaataaagccagggacaaaaagtttttggtttcccagtgtatataaaagttatgtttatactaccctgtagtctattaagtgtgcaatagcattacaatgaaaatgtaataccttaatgaaaaaataccttattgctaaaaaatgctaatgattgtcttaggcttcagtgagttgtactatttttgctggtggtcttgcttcaatgttcatggctgctgactgattagggtggtggttgctgaagtctggggtgtctgtgcaatctcttaaaataagacaacagtgaagtttgccacattgattggctcttcctttcacaaaagatctctctgtagcatgcgatgcatttggcagcattttacccacagtaaaacttctttcgacactggaatcagtcccctcaaaccctgttgctgttttcccaagtaagcttatgtaagattccaaatcctttgttatttcaacaattcacagcatcttcaccaggagtagatcctatctcaagaaaaaccactttctttgctcatccacaagaaacaactcttcatttgttcaaattttatgatgaaattacagcaacccagtcacatcttcaggctcctcttctaattctagttctcttgctgtttccacaacatgcacagtggcttcctccactgaagtcttgaaccgctcaaaatccttcatgatgcttggaatcaacttcttccaaactcctgtgaatgttgatattttgacctcctcccatgaatcgcagatttttttttttgattttttttttttttgagtcttgctctcacctagcctggagtgcagtggcgcgatctcggctcactgcagcctccacgttctgggttcaagggattctcatgcctcagccgccctcatagctgggattacaggtgcccaccaccacgcccggctaatttttgtatttttaggagagacatgcggtttcaccatgttggccaagctggtcttgaactcctgaccttgagtgatccacccgccttggtttcccaaaatgctgggattacaggcatgagccatcgtgcccagccagaatcacagatgttctaaatggcatccagaatggcctgatttcagtattgttgtgtctgagggaataaggaagcctgacgtgagtacagagagatgggaaatggcctattggttgagtaatcaggtgcctcaaaacaattaacaatggtaacatcaaatatcattgatcataaatcaccattaacagatataacaataatgaaaaagtttgaaatattgcaagaattgccaaaatgtgacacagagacacgaagtgagcacatgctgttggaacacatccctgatagatttgcttaatgtagagttgccacaaatctccaatttgcaaagaatgccatatatgcaaagtgcagtaaagcgaaatgcagtaaaatgaggtatgcctgtatatggtataagaaaaagatctaatttgacacttttgcatgtagatatccggttttcctggcatctctccattgaatggccttggcatccatgtcaaaaattgtttgaccatatatgtgagtgtttaaatctgggctctctattccattggtttataggtttgtatatctgtctttatgctggtaccatactgttcacactactatagctttgtagtaagttttaaaaccagctttggtccttctttttgaagattattttggctattagacatcccttgaaattccatatgaattaaagatggattttttctatttctgcaaaaactatcattgggatttcaacagggattgcattgaatctgtagactgcttttggaagtactgatgtcttcacaatattacattttccaatctatgaacctgggttgtctttctattgatttatgtcttctttaatttcttccaaaatattttgtagtcttcattgtaccagtctttcacctcctgtattaggttaattcctaagcattttattattttttttgatactgctgtaaatgaaattgttttctaaatttccttttcagattgttggttttttgggtttttggtttgttttgtttttcctttgagacaaattctcattctgttgcccaggctggagtgcagtggcacgatctgggctcactgcaacctctgcctcttaggatcaagtgattctcatgcttcagccccctgaagctactacttagctctcgagtagtcctgagctgagactacaggcatgcaccaccacgcttggctaattttttttgtatctttaataaagacgaggtttcaccatgttggccaggatggtcttgaagtcctgacctcaatccacccgccttggcctcccaaagtgctggaattacaggtgtgagccactgtgttctgacacttgttcattgttaatgcatagaaacacaactgatttttgcatgttgattttgtatcctgctctatcctttgcttttaaaaatatatgtattgggattttcccttacaatcaatattttgagatacttcattgtgccctcgatagcattctattatgcgggtattctagattggtcttcattctacagcccacagaacaaagctggcccattgcctgtttttgtacctaagctgaaagtggttttataatttttaaattattgcattttaagcagtacatatataacctttatcttgtttcttgaccataaaacctaaaatacttattattggcccatcaagaaaaagtatattaatccccattctggaacatacttagccagtctcttgttgaaattttatttgaattgtttctaatttcaggctttttttttttttaagagatagatcttgctatgttgaccaggctggtctcgaactcctggcctcaagtgatcctcccaccttggcctcccaaagtgctgggattacaggtgtgagccaccgcacctggccctaatctcatggtattctaagcaatattttagtaatgttcatcaaattttgccctcaaggatatctgtagggtaaatccctagtagaggaataattgctggatccacacatgtgcatttttattttggagagttaatgccacaagtcccctgaaggaaatcacagccactctcctctcatcagcagtgcatttcctatgtgcttacagtgtgaattactgatttttacacttttattgtctcattgttggaatttccatttatttaattgtaagttaggctgagcaccttttaataaaaaggtatatctatatgttcctgttttttgctccttttttctttcacatggttgtgggtcaggataagtaaggttaggaggccatgctgacttgcttccttgcgtgaagccctgtgggcttcttttgcagtgggcttctttcgtttgcacccttgcatgttagcacctaactctttgcaaggtagcaaaagagctaccagtctctgatgcccaatatggctgggaaaagcccctttctcatgatgtagcttccccagtctccagccaatcatcaccaaaagcccaagaagctattagctacaaattcctgctttgaggagatagggacttctctggggtcccacatgcacggctagactcaaggtttagcttacagtgaccttttcctcaatttaatagtaaaaaagacacccctaggtggaaactttttatgcttttgatacatgtgacaagtgttagagcatgtagacagcaagtgcatgcgccaaccgctggtcctcctttgcatacttgaccttaccagtattttatgaataggtatgaactactaccctaaagggaatttcccttaaggcactagctgccgtctctccttttaagcagcctgctctgcctctcacaatgtactttgcgctttgcaataaacttttttgcttactcttactttggatttgctgtcaatttcttttgtgtgatgaagtcaagaacctgatccggcccactgacaacagttgaattattgatagtcactagctatttttgtttctaataataattctttatatattaaggcaaactgagcttttgtcatatgagtatcaaatgtttttttcccaagtttgtcatttaaaaaattgtttaagtccgtatttaccctaaaagtgttatatgcacatgaatatagtcatcttttcctttatggcttctgggttttatgtcttacatgaaaatttcttccctatttgaagatgattaaaaaaaacttcatgttttcttttggttcttatatgtttttaaagtactttaatccatctggcattgactttggtatatggagtaaaggatggctctggctggtagtcagctgtcccaaagccatttcgtgaataatctatcttttttttcactgctttaaaatgccatctttccatatgtatttaggtttacttttcagcactctaatttgttccactgatctagctatacattcattcatgtactatttcacgcttccttaattaagtatagttttataatgccttttatcatttggaaaaattagtctttattagccttcttctgtagagttttcttggctattttttctatgaaattcagaatcagcttgtctaattaaaaagttggtatttaattgaaattgcattaaatttttagataaattcaaagaaaaactgtattgttagttcttcctattaaaaaccagggtgtatactgctatttattcagggttttttctttgctagctagagctttaaagttttggtttatataaattaattttaactgagtttattcctaggtattttttcttttctgggtattatgagtaagatttttcttttttatgttttctaacagattttttgtccatcaaaaatgattgtattttgatctttggagaaaaatgatggataggagacaggactaacttgtagctcccattcagatggacagagcaacatgtggagactcacactgtggacttttgctccaaaacctaccacaggaacataccaggaaagccaagagaatccacagaacctttgaaggaaactgattgctgctgcaggtccctggagacaacggaaaaaactccgaagacaaaggacataatctcttgggagctctagggccctgctcacctcctgatcctccctacattactgcagctaatgctgtcttgaaagtaccacctcctggctggaggccaatcaacacaaaactagcacaacaaacaaaaatacaaccaagaccctcacagagtccacttcgctcccctgctacctccaccagagcaggtgctggtatccacagctgagagacctgaagacatcacatcacaggactctgtgcagacactccagtaccagtctggagcccagtagctccactagttgtctagatccagaagagaaataacaatcactgcagtttggctgtcaggaagccatatccctgggggaagggggagagcaccacatcaagggagcaccccatgggacaaaagaatctgaacagcaacactcgaactccagatcttccctctgacatagtctacccaaatgaaaatgaaacagaaaaacaatcctggtaataggacaaaacaaggttctttaacacccccaaaagatcacactagctcaccagcaatggattcaaaccaagaagaaatctctgaattgccaaaaaaagaattcagaaggtcgattattaagctaatcaaggaggcaccagaaaaaggtgaagtccaacttaatgaaatcaaaaaaatgatacaagatatgaagggaaaaatcttcagtgaaatagacagagtaaataaataacagtcacaacttctagaaatgaaggagatacttagagaaatgcaaaatgcactggaaagtctcagcaatagaaccaaacaagtagaagaaagaacttcagagcttgaagacaaggctttcctattaacccaatctaacaaacacaaagaaaaaagaattcaaaaatgaacaaagcctccaagaagtttgttggtcttgaggaagaagagaaatctaaaagtctggaaagcatgtgtgagggaataattgaggaaaacttccctggccttgctagagatctatacacctaaatacaagaagctcaaagaacacctgggagatttatggcaaaaagagcatcacttaggcacatagtcatcaggttatctaaagtcaagatgaaggaaagaatcttaagagctgtaaggcaaaagcatcaggtaacctgtaaaggaaaacctatcagattaacagcaaatttctcagcagaaaccctacaagctggaaggaattggggccctatctttagcctccttaaacaaaacaattatcacccaagaattttgtgtccagtgaaactaagcttcataaatgaaaaaaaaagatacaccttttttcagacaaacaaatgctgagagaattcaccactaccaagccagcactacaagatctgctaaaaggagctctaaagcttaaaacacatcctcaaaatacaccaaaatagagcctcctttttttcttttttttttttttttgagacagtcttgatctgtcgcccaggctagagtgcagtggtgctatcttggctcactgcaagctccacctcctgggttcatgccattctcctgtctcagcctcctgagtagctgggactacaggtgcccgccaccatgcctggctattttttttttgtatttttagtagagatggggtttcaccgtgttagccagggtgatctcaatctcctgacctcgtgatctgcctgcctcagcctcccaaagtgctgggattacaggcgtgagccactgcacccggccaatagagcctccttaaagcataaatctcacaggacctatggaacaaaaacacaataaaaaaaaaaaaaaaccccaaggtattcaggcaacaaaattgcttgatgaatagaatagtacctcacatgtcaatactaacattgattgtaaatggcctaaatgctccacttaaaagacacagaaacaaacaaaacaaaaacaaacacaaacaaaagatacagaatggcagaatggataagaattcaccaaccaagtatctgctgtcttcaagagacttacctaacacatgagaactcacataaacctaaggtaaagcagtgaaaaagatatttcatgcaaatggacaccaaaagcaaacatgagttcacttaagatataagctattcttatatcaaaaaaaacaaacttgaaagcaacatcagttaacgaagacaaagagggcctagacaaagagggcctaatggccccttttatcatgataaaaggacttgtccaacaggaaaatatcacaatcctaaatatatacgcaaataacactggagctcttaaatttataaaacaattgttactagacttaagaaatgagatagacagcaacacaataatagtggcggatttcaatactccactgacagcactagagaggttatcaagacagaaagtcaacaaagaaacaatggattaaaactataccctagaacaaatggacttaacagatatttatagaacattctacgagcaactgcagaatatacattttattcatcagcacatggaacattctgtaagatagaccatatgataggccacaaaacagtctcaacaaatttaagaaaatcttttttttttttttttttaacagagtctgactctattgcccaggctggagtacagtggtgcaatcttggctcactgcaacctctgcctcttgggttcaagtgattctcatgcctcagcctcctaagtagctgggattacagacacctgccaccacacctggctaatttttgtatttttagtagcgatggggtttctccatgttggccaggctggtctcgaactcctgacctcaagtgatctgcctgcctcagcctcccaaagtgctgggattacaggcatgagccaccatgcccggccaagaaaatcaaaattatatcaagtactctctcagaccacagtggaaaaaaattggaaatcaactccaaaaggaactttcaaaactatgccaacacatggaaattaaataacctgctcctgagtgatcgttgggtcaacaatgaaatcaaaatggacgttaaaaaattctttgaactgaacggtaatagcgacataacctatcaaaacctctgggctacagcaaagacggtgctaagaggaaagttcatagccttgaatgcctgcatcaaaaagtctggaagagaacacatagacaatctgaggtcacaccacacataactggagaaacaagaacaaaccaaccccaaactcagcagaagaaaagaaataacaaagatcagagcagaactaaatgaaattgaaacaaaaaatacaaaagataaatgaaacaaaaagcttgttctttgaaaatataaataaaattgatagaccattaccaagattaaccaagaaaaggagaagatccaaataagctcaattagaaatgaaacaggagatattaaaaccaataccatagaaatacaaaagctaattcaaggctactatgaacacctttacacacataaactagaaaacctagaggagatagataaattcctggaaatatacaattctcctagattaaaccaggaagaaatagaaactctgaacagaccaataaccagcagtgatattgaaatggtaatttaaaaattgtcaacaaaaagaagtccagtaccagacagattcacagctgaattctatcagacattcaaaaaagaattggtaccaatcctattgacactattccacaacacagagaaagagggaaccctccctaaaccattctatgaagccagtatcaccctaatatcaaaaccaggaaaggacataacaaagaaaaagaaaactacagaccaatatccctgatgaacatagatgcaaaaatcctcaacaaaatactagctaacaaaatccaacatcatatcaaaaagataatccaccacgaccgagtgggtttcacaccagagatgcagggttggttcaacatgcacaagtcaataaatgagatatacgtaaacagaattaaaaacaaaaatcacatggtcatctcaatagacacagaaaaattatttgacaaaatccagcatccctttatcattaaaaccctcagcaaaatcggcatagaagggacataccataaggccataaaagccttctacaacaaatccacagccaacataatactgaacaggggaaaattgaaagcattctccccgagaactgaaacaagacagggaatgccccctctcatcacttgtattcaatatagtactggaagtgctagtcagagcaatcagacaagagaaagaaataaagggcacccaaactggttttaaaaaagtccaactgtcactatttgctgatgatatgatcatatacctagaaaaccctgaagacttctccaaaaagctcctagaactgataaatgaattcagcaaagtttcaggatacaaaattagtgtacacaaatcagtagctctgttacacacagcaaccaagctgagaatcaaatcaagaactcaaccccttttacaacagctgcaaataaaataaaataaaatacttgggatatacctaaccgaggaggtgaaagacctctacaaggaaaactacaaaacactactgaaagaaatcataaacaacacaaacaaatggaaacacatcccgtgctcacagatgggtacaatcaatgtgaaaatgaccatactgccaaaaacaatcaacaaattcaatgcaattcccatagaaattacaccagcattcttcacagaactagaaaaaaataattctaatgtagaccaatgaacagaagagaaaactcagaaataaaaccaagtacctacagccaactgatctttgacaaagcaaacacaaacagtcgagaaaggacaccctagtcaacaagtggtgctgggataattgactagccacaggtagaagagtgaaactggatcctcatctctcaccttatacaaaaatcaactcaagatagatcaaagatttaaatctaagacctgaaaccttaaaaattctagaagataatatcagaaaaatccttctagatattggcttaggcaaagacttcatgaccaagaacccaaaagcaaatgcaacaaaaacaaagataaatagatgggacttaattaaactaaaaagcttctgcacagcaaaagaaacaattagcagagtaaatagtcaacacacagaatgggagaaaatcttcacaatccatacatccagcaaaggactaatacccagaatctacaagaaactcaaacaaatcagcaagaaaaagaaaacaatccatatcaaaaagtgggctaatgacatgaatagataattctcaaaagaagataaacaaatggctaacaagcatataaaaaatgctcagcatcactaatgatcagggaattgcaaatcaaaacaacagtgagataccaccttactcctacaagaatggccataatcaaaaaattaaaaaaaattgatgttagcatagatgtagtgaaaagggaacacctttacactgctggtgggaatgtaaactactacaaccacaatggaaaaaagtatggcgattccttaaagaactaaaagtagaactaccatttgatccagcaatcccactactgggtttctgcccaaagaaaaagaagtcattatatgaaaaagatactcacacacatatgtttacagcagcacaattcgcaattgtagaactatggaacctgcccaaatacccatcaaccaatgagtggataaagaaactgtggtatatatatgtatatgtatgtatatatatatatatgtatgtatatatatgtgtgtatgtatatgtgtgtgtgtgtatatatatatgtgtgtgtatatatatgtgtatatatatatatccatatccagcagcggctgggtctgagtgagagtaattaaggaggtggaattggctaaaattgaatgagcgtttactacgtgtctgggagtcagtgctttaagcccagccagcctaggatcatttccatcttttacaaatgaaggaaactgggctccgataaagtacaatatgtgcccaggttccctggtctgcaggtgatggaggcagttttgggactttgagagaaggcgtgaagaaaggcttcagctttggggggctgtcatgaagcaggagagccagcaggagcaggggaggagatataggaccggagatgaagatttccgctcagcatatgctgcgcagaaagtctggccggcagatgactccgcaggtctgggccaggagtgagcctgggccgcagttggagatttgggacacctccttaatttcctgccttaaagccttcacccagcagtgaggtctctgctaggactgagacctcccaatcccagctctgtcctttctggagcctcaagaatggctaattcaaggattgggtgtcatcgttccccccagctagtgtgagttgaacttcaccaccccaggccatttccccttgaacatgctggtccctctgccagattggtccccctcattgattgcacccagcctgaccactctgccacttactagctgggagacctcggtcaactgaccaatttaacttgtctgtgcctcagtctctgcatctgtaatgggaatgcgaatgatacctgcccgagggttgttatgaggattacatttctattattttaaattattattattttaattaaatattagtacacatgtaattgctatttaaatgttgctaagtaagaaaatgcaactagagatttttgtatggggcatactacgagcattaagaaagaaggtcaattttatttggaagttggaaagggatcaagaaagaaattattcttgggctccgtctgccctcacctccttgctgtggccagttagtctcagggcttggcttctgtttgatagtctagtgtgctgtggtgaagcggttgtgtgctaattctaatttctttacgttcttcccccaaaaccagatatgtcaggtctttttttgtcattaatttttaaaatttttatttattaatttatttttgagacagggtctcgctctgttgcccaggctggagtgcagtgatatgatcatggctcactgcagcctcaggtgcctgggctcaagcaatcctctagcctcagcctcctgagtagctgggatcacaggtgtgtgccaccacactcagctaattttcttattatttttagagatggggtcttgttgtgttggccaggctggtcttgaactcctgggcttcagtgatcctcctgtttctgcctcctaaagtgtggggattacagacatgagctcacagcaaaattgagaaaaagatacaaagatttcccatatacacaccacgctcgcacatgcaaagcctcccccattattaacatcccccaccagagtcgcacatttgttcattataaccaatgaacctacactgaccatcattatcacccacaggccatagtttacattaaggttctctcttggtgtacattctgcaggtttggacaaatgtataatgacacgtacccaccattacaggatcacacaaagtagtttcactaccctaaaaatcctctgtgctccatcaaaaagcttatccaccatgatcaaatgggcttcatccctgggatgcaaggctggttcaatatacgcaaatcaataaatgaaatccagcatataaacagaaccaaagacaaaaaccacatgattatctcaatagatgcagaaaaggcctttgacaaaattcaacagccctgcatgctaaaactctcaataaattaggtattgatgggatgtatctcaaaacaataagagctgcttatgaaaaactcacagccaatatcgtactgaatgggcaaaaactggaagcattccctttgaaaactggcacaagagagggatgccctctctcaccactcctattcaacgtagtgttggaagttctggccagggcaatcaggcaggagaaagaaataaagggtatccaattaggaaaagaggaagtcaaattgtccctgtttgcagatgacatgattgtatatttagaaatccccatcgtctcagccgaaaatctccttaagctgataggcaacttcagcaaagtctcaggatacaaaatcaatgtgcaaacatcacaagcattcttatacaccaataacagacaaacagagagccaaatcatgagtgaactcccattcacaattgcttcaaagagaataaaatacctaggaatccaacttaaagagatgtgaaggacctcttcaaggagaactacaaaccactgctcaacaaaataaaagagaacacaaacaaatggaagaacattccatgctcatggataggaagaatcaatattgtgaaaatggccacactgcccaaggtaatttatagatgcaatgccatccccatcaagctaccaatggctttcttcacggaattggaaaacactactttaaagttcatatggaaccaaaaaagagcccacattgccaagtcaatcctaagccaaaagaacaaagctggaggcatcatgctacctgacttcaaactatactacaaggctacagtaaccaaaagagcatggtactggtaccaaaacagagatataaaccaatggaacagaacagagccctcagaaataataccacacatctacaaccatctgatctttgacaaacctgacaaaaacaagaaatggggaaaggagtccctatttaataaatggtgctgggaaaactggctaaccatatgtagaaagctgaaactggatcccttccttacatcttatacaaaaattaattcaagatggattaaagacttacatgttagaccaaaaaccataaaaaccctagaagaaaacctaggcaatgccattcaggacacaggcataggcaaggacttaatgtctaaaacaccaaaagcaatggcaacaaaagccaaaattgacaaatgggatttaattaaactaaagagcttctgcacagcaaaagaaactaccatcagagtgaacaggcaacctacagaatgggagaaaatttttgcaatctactcatctgacaaagggctaatatccagaatctacaaagaactcaaagaaatttacaagaaacaaaaacaaccccatcaaaaagtgggtgaaggatatgaacagacacttctcaaaagaagacatttatgcagccaacagacacatgaaaaaatgctcatcatcactggccatcagaaaaatgcaaatcaaaaccacaatgagataccatctcacaccagttagaatggtgatcattcaaaagtcaggaaaggacaggggctggagaagatgtggagaaataggaacacttttacactgttggtgggactgtaaactgattcaaccattgtggaagacagtgtagtgattcctcaaggatctagaactagaaataccatttgacccagccatcccattactgggtatatacccaaaggattataaatcatgctgctataaagacacatgcacacgtatgtttattgcagcactattcacaatagcaaagacttggaaccaacccaaatgtccatcaataatagactggattaagaaaatgtggcacatatacaccatggaatactatgcatccatgaaaaaggatgagttcatgtccattgtagggacatggatgaagctggaaaccatcattcttagcaaagtattgcaaggacagaaaatcaaacaccatatgttctcactcataggtgggaattgaacaatgagaacgctggacacaggaaggggaacatcacacccgggggcctgtcgtggggtggggggaggggggaggatagcattaggagatatacctaatgtaaatgacaagttaatgggtgcagcacaccaacatggcacatgtatacatatgtgacaaacctgcacgttatgcacatgtaccctagaacttaaagtataatttaaaaaaatcctctgtgctccacgtatttattcttctcctcccaacccctggcaactactgatcattttactgctgccttttccagaatgtcacatagttggaatcatatagtgtatagctttttcagattgatttccttcacttagtcataggcatttaagtttcctccacgtctgttcatggcttgctagctcatttctttttagcactgaataatatttcattgtctggatgaactacagttgatttatccattcacctactgaaggacgtcttggttggttcccagttttggcagttatgaacaaagccactataaaatctgtgtgcaggtttttgtgtgtacgtaagttttcaactcctttgagtaaataccaaagagcacgactgctggataaaatggtaagaatatttttaattttgtaagaaactgccaaactgtcttccaaagtggctgtatcattttgcattcccacaaaaattcatttgtgttgtaacgaatgagagttcctgtcactccacaacttcatcaacatttggtgttgtcagagttctggattttgtggatttgggtcatttaataggtgtatagtggtatcccaccactgttttaatcacatttctctaatgatgtatgatgtcctctgttgatggacatttgggttgttcccagtttgaggatggtacaaaaagaaatgctgaaaacattcctgcaggtatttttggtggtcctatgcactcattttgcttcagtatacacatagaagtgtgaaactgctgtatccaaagatatggatgtgttcagctttatgaaactgtgccaattgggtttccaaggtagttgtaccagtttccacttatgcctggagttagtcatatttaaaaactagaaacatttctttcatattgaaataactctgggatttgcataattcaaaggaggcctggtacggcttgtaacaatctgaaccatgctccttttcaacagagaattgtaaaatggtattaaaggagtataatttgttccccttgctaatagtaaaagagaaatgattcacacaaagacacagagaataatggaagccagcattcttgaatctgtcttccctgtattaaactattacctaattaacagcatgctggggtcgtacattggattctggagccaacctccagggtgcactggagtctatttgaggatggagggtgggagaagggagaagagcagaaaacataactattgggtactgggtttaatacctgagtgatgaaatcttctgtccaagaaacccccatgacatgggtttacctatgtaacaaaccttcacatggacctttgaacctaaaataaagggcctttattacaaggcctttatcacaaggacctttgaacctaaaaaaaagtttttttttttaaagaaaaaacattctgctaaaaatgtacaaatgtatgatacaattgaatatttgaatacaactgaatatattaaataagacattttggccaggcacggtggctcgcacctgtaatcccagaactttgggaggccaaggtgggcggatcacttgagattaggagttcgagaccaacccatgcaacatggtgatactctgtctctttaaaaaaaaaaaaaaaaaaaagaaagaaatttttattaattttcatatgtaaaaagagtagggtggtcaggcacggtggctcacgcctgtaatcccagcactttgggaggctaaggcagcggatcacaaggtcaagaaatcgagatcatcctggccaacatggtgaaacctcatctctactaaaaatacaaaaattagccgggcgtggtggcatgcacctgtagtcccagctactcgggaggctgagacaggaaaattgcttgaacccaggaggcagaggttgcagtgagccgagataggaccactgcactctgagctggcgacagagtgagactgcgtctcaagaaaagaaagaaaaagagtagggtaattgtgataaaaataattgtatcttttggagatacatgtctaaatatctagaagtgaaatgatacaatgtctgggatttgcttcagttctatgggtggagggggatgtcactgagtgggatgtggggggcaggaccagtcaccactgatggcaattgaggctgggcgatgggtactgtggattcactcaactctgaaccatttctgtgtatcttcaaaactttccatggtaaagttatttttaaaagctactcttaaaaaaagatataaaaaatcatgtaatctattttagaaaaatttccatcaaaattgctaaaataaaatatggcaattgaggaaggaaaaaagtaagaaaaaaatgcaggaaatatagtaacatattttacaataatgtcaatccaaaatattatttaagaagattttgctacatgacacgagtagggagtgatattgtcaattatctgaagttgcccatctagaagttatcaataagcttatttatccatcatgaatttgctggtaacccactgggggcagggcatcaggaaccccagcccgggcagggagacctaggcagtgtcctcatcggcctccccgcctatgccagtgaccataccaccaagtctctctgcgtctgttttctgctctgaacagtggagctcatgatggcattagagcaacacccattttactgtgttgtgaggagtaaagatcataatggacataggtgctcttgattcatttgggaaaaaagaggggcatggggcagggatttgcttgtggaatagtgctctgagggcagggaaagcaggtagctatttttatgggaaccacacacaaccctaatactgtaggagttgaaagaacaagcttttaggatggctcccagcactgccccttgggagctgtctgccttgggcactctttgccataggcgctgtctgtcggtgccccaacgacgtcttcatcctggaattcaatcagacctcaaagccccgtggtgataatcaaaagtatcaatatgtggcaaaggtgtagaagagtgattggcttgtaggaagcacttaaggcaggtgcacaatcaactttgtgattactactaatataataaagcagcaggttgtttactctgatgtcccgtggaccccttaagtatttctggagccaggcctatgtctgcaaaatgatgagttcctgccccagagagctacagcatctttctgtaaaaccataattgattcagactgcacctaactaacctagccagaaagttggaatttcaagatgaccaactagacctttaatagttcagtgcttttatagttcatgtccagggtcacatgtcactgggaaacaaacctccatccttctgtcctgtgaaatgggtactcatcctcaaggtggtagaaaggagaggctgctttccactctgttgatgttgttaagtccttgcttaaagggtaagactgggaggtcccaggaaggcagcctgaacaatttctcttctctctgggtttgccacagacacttcagtgcctgccttcctgacagtgggatacgccgggtgattcaccaggttcagtctgggaggaggcgtggaggatcctgcctatcttctcagacacgcaaagtcccaggttttgttttccgagtcttggcgtccccagccaaagttcctgggtactggctgccacccatgggagaggggaacacccaccagctccaccccataggacattgctagggccttagtcacctagaaaagccctccacgtatttgcctggttaatgcaacaatagaagggttacgccccagcaactttggtctcctcactcggtcacctcaagaaagcctcatcaaacctttgccatgaaagcacaatgccagaaacgcggctgcgtgcctggcttagccatacttgggctgctcttcattcaaaaaggcctctggcagcctctcctgaaatcatttgggctcgagatgtcattccctggtcacacctagattcttaactgatttgttaagatttatgaagaaaggctccattctcttattcacttggcaaatactttttggctcctgttcagaggtgattgcaagaagcacacggagaagtcagatgtggtctccggagctgttctggcagttttcacaaggcccaggggcagggtagaggtgcatgaggccggggtgagttcttggcctgaagatctgaagacatagacaagttgaggtactgctaacatcccctagggagtcccagacttttgtgccacctggggtcaggcaacagggagtggtagggcctgcggtaaaccagagaatgcacgggctttctagagagcagccgccctcccgagtagctgactgctgccttgtggaaataagtgcccagctgagccagatctcttgttttgtcaagagaagccaggaatttggagttattgtgaaatttacggtatttcatgttaacaactaattttttaaaaattatatatacacatggaaagatgctcaacattggtaatcattagggaaaaacacaccaaaactacaatgaaataccacctcacatccattaggatggccattatttttttaaaaaagaaaataagaaatgttggtgagaatgtggaaaagttgaaatccttgtgccctgtcagtaggaatgtaaaacggtatagccactgtgaaaaacagtatggcagttctgcaaaaaattaaaaatagaactaccatatgatccagcatttccacttctgggtatacttccaaaagaactgaaagcagggatactaacagatatttatacacctctgtttgtagcagcgttattcataatagccaaactgtaccaggaacccaagtgtccatcagtaggtgaatggattagcaaaatgtgatatacgtgagtgtatacaatgagacattatttagccttaaaaaggaaggaaattctgacagtgttacaacgtggatgggtcttgaagacatcatgctaagtgatgtaagccagtcacaagaagacaaatgctgcatgattccgcttctatgaggtacccagaattgtcaaagtcacagagacagaaaatagaatggtgggttgccaggagctgggagagaagagaatggagaattagcatttaatggatatagtttctgttttgcaagataaaaagagctctggagatggttgtacaacattatgaatgtatttaatgccactcaactatacactcaaaatggataaaatggtgaattctatgttatgtgtattttaccacaataaaaaaaaatgggaacaaaattgtaagtacagcacaattcaaacaaaatttgtctttgggtcctgtggggcccgaggctgctagcttgtccttctgccctactggtcttctgcgagagcccatggccgttccacattctggcctaactccactctgcgtagtcttgggagctggacacacctaggtttgaatcctggctctgctccttagtagtcatgagatgctgaattcttctctaccaatgggtctgggattataaaagctttgtctctgagaatatttgtttcctaccagaaggctctgaaggaaacaaatctactagattcacgacctggacagagcatccattgccaatgtgaataaactctgtgtgaaactaaagcagagctcagctcctggctgtgaggacgagttcccagcacactgatttgaagtggtacttcagaactataaactctctttgacctcatgcttaacattttaagaagagggcagcaaaatcgccaaggtatgctgagagcaagtgttcatgtgcacccagccaaacattgtgaagaaaaggagtagggagaggacatattcacaaaacaatttttttttttaagagacagagtcttactctgtcaccaggctggagtgtgatggtgcaatcatggctcactgcagcctcaaattcctgggctccagcaatcctcccacctcagcctcccgagtagctaagactataggcgtgtgctaccatgcctggctaattttaaaatatatacagattatagaggtagggtctcactatgttgctcaggctggtcttgaactcctggcctgaagtaatcctcctgccttggcctcccaaagtgttgggatttaaggtgtgagcaaacacgcccagccattttttaaataatgtaatttcccccacaatttccctgtagagtttgaaatttttgttgactgttttgtctgagggattccaatggacttgctttttcttatggtataaaatgtagcaaaagtaaattagaatttttgagttatattcttaaaatttgccacctttccttggacaggtactagagatttgaaaacaaataaactgtgccaggcccctgtctgcaaggagccgacattgtagaggagaagacagagtgtgcttaagcgtagtttgctaacttctgagtgtgaaaattgattatacaaattgggtcattcttgtcatacccaacaaaaacagagttgagaagccagaagggaaaagcacttgcggcatatagcattgctccaaaaatttaattctctccaagtccagcagctaaagctgcctgtggtaacctaagaccagctttacccaatagctgctgaaacaagaccagccttggaccagctttacccaatagctgctacagctcaaagactaattttacccaggcctgtggctcaccaactggagctttccagctccccacaactttactaatacccatgaactttctttcaagaccacaggcaacatttctttttaaaaataaaacccccaactttctctttgttcttcagacacaccaaagagtacctagtctatgtgtacgccccaaattgcaattcttgtatcccaaataaaacgttaaatttagagactcatctctacatttttattagactatggcatggacaagagggtgcaacaagagtaccctgctgggcacagtggctcatgcctgtaatcccagcactttgggaggctgaggcagttggatcacctgaggtcaggagttcaagatctgcttagccaacatggtgaaaccctgtctctactaaaaatacaaaaattagctgggtgtggtggcacacacctgtaatcccagctactcaggaggctgaggcaggagaatcacttgaacccaagagacggagtttgcagccgagatagtgccactacactctagcctgggagacagagtgagactccgtctcaaaaaaaagaagaaaaaaaaggcactaagagtacctaggataggtaagcaactcagctagataggagaggccagggaagtggcctgctggagaggagatcagagttgaaaaataaggctgaccaggagttagccagagtaagtgggagtggggagatggaggagcccacagaggtggagctcacctgtttgcctgtgatgtaaggcctagaatttcgttcaatattaagtgctgctttgacatctggtcaaactgagagagcctagaatgctctaaccacaaattcccctcccttctgctctcttggataagatcccctagccaaacacggtgcagttcctgcttatctctgagcagtgggtgtcagtcagttccctgtcagcctgagaaattattcaaacaagcccatcatattctgctgcaggaatcaggaatcaccctacccttttgatagcacaaagcctgactccagaccctggctattcactctgttcccaagtgtagcccctgtggccctgcgtgctatgctgtgttctgatccagaatgtgagttataaactgccgtcatctcatctgtccagtgtgaggtgtcctgtgtttggccatccccataaccctggaacaggaatccctttctcaccagcaggatgaatagcaggtgattaaaacaatccctgtaaggggtctgtgtgcaaagccatcaatcagcattgctcaaggatcccctgaggttgggagcaacaggatggctgctaaggaagtggtcagagaccagccccggaaagttttagtcccttttaaccagccattgcagatcatagtggcgggagcccctggggggtgtcgagcaggggttagccccctggccagatctgagttgttgttttattttattttatttatttatttgtttattttactttaagttctagggtacatgtgcacaacgtgcaggtttgttacatatgtatacatgtgccatgttggtgtgctgcacccattaactcgtcatttacattaggtatatctcctaatgctatccctccccactctccagatctgagttttaaatagatggttctggccagtgtgtgggctgggtttgaaggggatgagactaaaaggagcaagtctgattagggagtcactgcaggtgcccaggtaagagacgataggacctcaactaggaccagaaatggaggggtagagagagaaggtgagccttggaaggtgtttataatgcagaaaatataattgggttggccccacttcttcaaaagacagcaaatatgtgttgaatacactagtgcatgcatgaatattaattgagattttattgggcctaggagaactgcagggtaaggttgggcagggtgggcacttcccaaaggcgccagtcatgggggtgagggctgtagggtccgctctgcactctgctcaccaagtgcaatacagaggtttgcagagggcaacatggagacctaagacaaagatatagccccccaggtgctgaccgattcgtagacgtgaactatggctatgactgcatgctaaattgctgattccggctaggtgggcagaagagttctgaataggctgatgccatttctctccatgttctcctgtaagataagagctgggcttcttgaaccaaaaaagttttacttttttcctgggggtagaattaaccttcaacctgttgactcaagtgtgtattaaccaataatctaaattaaaaactttaaaaagtcaaggccggttatcaaggtcctctgaagtgtgatttcaagagaaaatttagaaatatgagaaactcaatgtattaaacaccaaagggctttatgtcagtggttctcaatcttggatgtgcattaaaacatctgggggcccttttaaaatacttaaacctgagctgcatgccccgcgcttttgattcagtttgagaggggcagagctcggggatctgtatttacgttatcattctcggaacagctctagagggcactgtctgccagatgttagctcacgccctggcagaaaacgccatcgtgagaacagcaggcaccatttttctggacttttaaaatcattagctttcaggcaaatactgagtaatctcattcacatgtagaatctattttttagctttttaattaaattttttcctttttaaaaaatttattttattaaaaatattagtttatacaaaaaatttaaaatttccttttttagagatggggtcttgctatgttgcccaggcttgagtacagtggctagtcacaggcccaatcccactccaaacagcaagggagttttgacctgctccgtttccaacctgcactggttcacccctccttaggcaacctggtagtcccctgttcccaggaggtcaccgtattgatgccgaacttagtgcagacacccaatcagcattgcacactacagcccagaactcccagcctcaagcgatcctcctgcctcaggctcccaagaagctgggaccacaggcatgtgccactgcacccagcaacatgtggaatctaagaaagttgatcatagaagcagagagaatagtggttaccagatcctggggaggggagggttggtcaaccagtacaaagttacagttaagaagaataagttctggtgttctattatacaatagagtgactataactattaataataataatgtattatatatttcaagatagctagaagagaggattttgaatgttaacactacaaagaaataataaatgcttaaagtgataaatgtgctaattgtgctaattatgctaatatgattattatacaatgtaccatgtattaaaacatcatactgtaccccataaatatgtagaattatgtgtcaagtatagataaaataaaactaaaaaaaatcgctagctttcattacctagttttattcacacattatactaaatcaatgctcaaaagtcttgttcatgttcagacaaaacaatcaagatttataagtatagggaagcttcaagttgaaaaaattgatatccaagaagattccatcttgatttgaacttaggcacattatcaagcatttgaagggctagttgttatcccttctgttgcagctgaaagccctgataaattagttaggttgacatcttaaattctcatgacaaattttgtttcatctccctgccccaaagtaagccataaatcaagctttacaaggacttagaggacttttggcctggcatggtggctcacacctgtaatcccagcactttggaaggccaaggcaggcggatcacaaggtcaggagttcgagaccagcctggccaacatggtgaaaccctgtctctactaaaaataccaaaaaaattagccaggcatggtggtgcacacctgtaatcccagctactcgggaggctaaggcaggagaattgcttgaacccaggaggtggaggttgcagtgagccaaaattgcgccactgcactccagcagcctgggcaacagagcaagactctgactcaaaaaaaaaaaaaagacttagaggatttttttccccctaataagtttcccaaagggtgtggcagagtctggagaaacctgcttttcatgtgctccttggttcagctgcctgctcccctgtggcttttagcaatttcttcttctgtttccgcatcagtgtaattagcaaaaggcaccatatccctgaggacaacacccacaaaaatatgagactctacagcaagtacttgcaaaacctagaaaagacacatacccctcccctaacatgcttcaattccaagacaactcattaattcatagagtaatgtatgtgagcaaacagagaaaattatgaactccaaagtgaaacctggctaaagatgtgtaatataataaatatatttacatgcaaaaataaagatatctacatgtgacatatatatggatccatatatatggtgggattatttatttatagtagaattccccaaactttctcagctcattgcaccctgagcatctcagtaatttttcacagcacctcctaggccaacaagaataccccaaacttccattattaggttcatacaacataagtatttagtagccactgaaaaaatacacataactcctaaaaaatttacttccccctaaaataaacatccttaaataagttaaatatgaacgtgcctactgggcactccacaacttctcaaatccggagtctggttggaactgacaccttcactgcctgcaccaccacggaccttcaatggtacttttttttttgtcacagcaaacactggaaagtcagcttcgcaaatatataatatcattaaaaggaaggagcatggtctaatgatgaaatgtgaaatacgtcaagccagtctcaacctctccgaggctcagtttcctcaccctggaaaggtaataaaataaatgcatgctttttttttttttttccttcggagatgcagtcttgctctgttgcccaggctggagtacagtgggcgatctcggctcactgcaacctccgcctcctgggttcaagcaattctcctgcctcagtctctggagtagctaggattacatgtgcccgccaccacgcccggcagatttttgtatttttagtagacatgggttttcaccatattggccaggctggtctcaagctcctgatctcttgatccacccgcctcggccttccaaagtgctgggattacaggtgtgagccaccgcacctggccaatgcatgccttccctacttaacagttgtgaaaaatgagtgggataaagtgtaaaaaatatctctcagcactataatgcactataataatagacacttttttttttttttaagacagagtttcgctcttgttgcccaggctggagtgcaatggcacgatctcggctcaccgcaacctccacctcccgggttcaagcgattctcctgcctcagcctcccgagtagctggaattacaggcatgtaccaccatgcccggctatttttttttgcatttttagtagagacagggtttcttcatgttggtcaggctgatctcgaactcccaacctcaggtgatccgcccgcctcggcctcgcaaagtgctgggattacaggcatgagccactgcacccggccaataatagacactcttatgtgtagtaataattactaaaaataataaattggaaatgatcacaagacaaatggagttaagaaattaaatactatgtattttgaaaattatcatcatctttaaatcttgctactcagcatggccccaggaccagcagcagtgagagcttgtgagatgagccgagattgcgccattgcactccagccccggcaacaagagcgaaactccgtctcaaaaaaaaaaaaaaaaaaaaaaaaaaagaaatgcagattctcgggcttcatctcagacttgctgaatcaacacctgcattttaacaagatgcccaggtgtttatgtgcacattaaactttaggatgggagccaaacgataagaacttttgaacacaaaggaggaaacaacagacacgggtctacttgatgggggagggtgggaggagggagaggagcagaaaagataactattgggtactgggcttaatacctgggtgatgaaataatatgtacaacaagccgccatgacacgtgtttacctacgtgaccttcacatgtacccccaaacctaaaataaaagttaaaaaaaaatttagggaacaccagttcaatttatttacattattttaaattggatagttttagtaaacttacttcttccaatcacaatgtagtagaaatcaataacatagggaaatcttggaaatatccaaaggtttggaaattaaatgacacacttctaaataacccatagatcaaagaagaaatcacggaaattagaaaaatattgaaactgaatgaaaattaaaacacaacatgtcaaaacaaatggaatgcctctaaaataatacttagaggaatgcttatagcactaaacacctatattttaaaagaaaaaggtctcaaatcaattacctatgcttccacttcaggaacccagaaaaagaagaacaaatcgaacccacactaaatggaaagagaaactagtaaagatcagagcagctgggcacagtggctcacgcctgtaattccagcactttgggaggccgtggcaggcagatcatgagctcaagagatcaagaccatcctggccaacatggtgaaaccccgtctctactaaaaatacaaaaattagctgggcatggtggtacacgcctgtagtcccagctccttgggtggctgaggcaggagaatcacttgagccctggaggcggaggttgcagtgagccgagactgtgccagagccaaaatcaataaaacagaaaataaaaacaatagaaaaatcaatgaaacataaaaagttggttatttgaaaagtcaacaaaattgataactgtttagctagactgacaagaaaaagagaatgaagatataaacttccaaaataatcaagatgaaggaggatgcatcactgcatgcccaacagaaatcataagaattaaaaggaactattacaactttatgtcaataaattaaacaagttagatgaaccaaattccaagccaggaaactactaaaactgactcaaaataacataaaatctgaatatgttaacatcagttatagttagtaattttatccattaggattagtaatttaaaatcttctcacaaggaaatcccaggcccagattgtttccccagaattcgtttgatgaagtcccttgtaaattctatcaaacatttaacgaaaatgaatgggctagtacaatccaacacaaattctataaataagtattatagaaaggtaaagaacaatttccaactcattttattaagccagtattaccctgacaccaaagctaaagacatcataagaaaagaagactatgggtcaggtgcagtgtctcatgcctgtaatcacgggattttggaaggccaaggtgggtggatcacttgaggccagaagtttgaaaccaatctggccaacacggcaaaaccatgtctcatctctactaaaaatcaaaaataaaaataaaaataaatcagctgggcgtggtggtacatgcctgtaatcccagctacttgggaggctgaggcatgagaatcatgttgaacctgggaagtggaggttgcagtgagctgacagcatgcctctgcactccagcctggatgacagagcgagactctgtctcaaaaaaagaaaagaagactgaacaaatagctctcatgaacaaagatgcaaaatccttaacaaaatattaacaaatgaaacccaagaacatataaaaagaaattgtggtggttttcacaaatagccacaaatactttgatactgctccctttaaactatgaatcctaactgtcctcttgattgtgggctgaacttagtgggttacctctaatgaaaagaatgcagtggaactggcagtgttaggatcccaagggtaggtcacaaaaggcattgtggctttctctttgctccttctctattttccttattatctctggggaaagccagctaatgtgtaatcggtccactcacacagccctgcaccctatggagaggcagacatggcaatgaactgagcctcctgccaacacccagcaaggaactgaagcctcctgccaagagccatgtgagtgaaccaccctgaaattgcatcctccaggcccaagcaatgcatcagactactgcagccctggttgacatggtttttttcttttaagctcctttattattttgttgaggtgaaatgcatataacataaatcaaccattttttaaaagtacctaatttagtggcatttagcatattacagtgttatgcaaccaccactcctttcaagttccaaaacattttcatgactctcctctcaaaagcaaaaccatgcccattaaacagtcactccccattctcccctccctctagcccctggcaaccatcaatctgtcttcatgaatttacccattctggatattttatataaatagaattatataatatgtgaccttctatgtctgacctttttcacttagcatactgtttttgaggcttatccacattgtagtaggtatcagtacttcattccttttcatggctgaacaatattccattgtgtgcatatgccacattttgtttatccattcatcagttgatgtacatttgggttggttctatcttttggttattgtgaatagtgctgctatgaacatttgtgtacagatatttatgtagctgtgtttaattctattgggtgtataactatgagtgaaattgtcagataacgtggtaatcccgttttacttcctgccaaattgacaaactgtttcccacaccagcttcatcattttacattcccaccagcactatcccagagttccaatttctccacttcctcaccaatatttgttattttccttttaattttttaaaatatggccagactagagtctcattgtggttttgatttgcatttccctaatgattaatgatgttgagtatcttttcaaatgcttatttgccatttgtatatcttcttccaagaaatatcctttgcttagttttgaattgggttgtttattacgatgttgagttttaggagttctccgtgtattttggatattaattccatatcaaatatgtaatttaggtcaggcatggtggctcacgcctataatcccagcactttgggaggccgagggaggcggatcacttgaggcctggagttagacaccagcctggccaacatggtgaaaccctgtctctactaaaaatataaaaattagttgggcatggtgtcacacacctgtaatcccagccacccaggaggctgaggcaggagaatcgcttgaacctgggagacagaggttgcagtgacctaagatcgtgccactgcactccagcctgctcgacagagtgagaccccatctcaaaaaaaaaaaaaaaaagtctgtatctgacactggcacataaagtggaaagcaagagtgaaaaattatgctgaaaactggggagatcgaattaaaattctacgtatggaatccccctgagagctcagtcctctttctacgcccttgtgaaggaacagtgcacatcctcatttattgccaggtagagaaaaaaagtgcagacaaaccagagaattcttctctaacaaaaagttgagtgagcggctggagaaagccaaggcttctcacatatcgttccctgcagcagagctctctcatgtgatcacccccagcatctgcagcctgtagcctctagattgaaatctttttttttaaatatcccccgagggttgaacattcctggaggtactcaataccaggtccatgtgtggagtggatggagcaagctcctattccatctccctgctcaaaaaatccatttactatattgtcctcagataaaggacatatcagcatattaaactggtaagaacagattctacacttgaacttaaccaaaaggccaagaagcgatctagagtgaaatcttatctgtaagccctggacaaacccccttcttccacctatccccaggaaacaggccttcctacacagaaggataggaaatccacacaaatcacagaatcctttccataacagacagggaggaccgaccagacatatgatgaaaccagcagtgtggaagagaagtcaaaggaaacaaacaggaaaactgatgcaggttgaatatcccttatcagaaatgcatgggaccagaagtgctttggattcagatttttttgagttttggaatattgcatatacatcatgagatatcttggagatcaaacccaagcctaaacataaaattcacttatgtttcagacacaccttatacatatagcctgaaggtaattttatacaatattttaataacttttgcataaaattaagtttgtgtgcattgaaccatcagaagcaaagatgccactctctcagccacccatgtggacaatctgtggttccctggcatcaccatcattcctgactgtgaatgtctatgttctcaacaagcaatcattttcttacacttacattgtgacctatcacatgtaatgtgatccatcatgtgacccatcacatgtaatgattgctgaggcagcaaaatcattctcctccctcagcctcccgagtatttgggattacaggcacctgccaccatgcccggctaatttttgtaattttagtagtgagggggtttcaccgtgttggccaggctggtctcaagctcctgatctcttgatccacccgcctcggccttccaaagtgctgggattacaggtgtgagccaccgcacctggccaatgcatgccttccctacttaacagttgtgaaaaatgagtgggataaagtgtaaaaaatatctctcagcactataagtgatctcattgtgctatgttagtatttttgagtgcctattaaaaggcctaattaaaaatattaaagtaattatattctttatcccttagtttctttttctatgtaatgactattagggcagaatatcttcctcagggcatgataaaagataaaagatagataacaatgcaagatataaaatacccaaataaaggaaattatgctaagtaaaataagccaggcacagaaagccaaatactgcatgacctcacttacatgtggaatttttagaagttgaacttaaagaagcagagaatggaatggtggttgccaggggctggggacagggatggggagatattggtcgaagtgtataaaggatttattgtatagcaaggtgactataactaataatagtgtatacttggaaattgctaagacagtcgatctaaatattctcacagcaaaaaatggtaagtatgtgaggtgacaaatatgttaattagtttaatttaatcatttcacagtgtatatatacatatatctaaacatcacattgtacaacataaatatatacaattattatttctctattataccttaataaaactagggataaattaaaatgaaatcaaattaaatatccaaataattaggtttcaagcttccaattaaagatttcactctcatcttagaattttagttggggaagcaaaaagatgcagctacaagggtaacgtttacacagagaatggcatttgaatgaagctcagttccaactgctagcttaccaccctcagccccttccttaaccaacgtatgtaaaggatgctgaggctggtgtggatttcctatgctattgtttattaagatctgttccctggggataggtggaagaaggggacccaatataggaggaaccttgactttctctggaaaatacgccaatttttgttagagaagaatatgatgtagtgatgtattgagagagagagagagagagagagagagagagagatgtataatacacacaaatgtatgtagaatccattgttctacacgatgagaatctattgttgtaatatttggtgtttgacccctggttcctaacacagagctccttaaggcctttgtaatttcctcagtgatggcgtctgacacagagttctaaatcccttggaatttcctgagtgacaggagcatcttttgttctcaggacccgacgcgtggtttgctcctggatggcctcataatgggggctggttgccaggggaaccaaccttgtgattagaaggttgaaactttcagccccacccctgacctccagggagccgggagaggctgaaggctgagttgatcacccgtggccaatgatttaatcagtcatggctaggtaatgatgcttccctaaacccaaaggactgggtttggggagcttccagatagctgaacacttgggggttctggagggtggtgagcccagggagggcagggaagcttcgtgcgccttcccacacacctcaccccacacatctcttaagctggccactcaactgtatccttgccagagccttataataaatgggtgaatgcaagtaaagtgtttccctgagttctgtgagctgctctagcaaattaatcaaacctaaggaggacgtcatgggagccccaaatccaaatctgagctggccagtggaggtagaggtgacaacttactatgtgcaactggcacctgaagtgggggcaatcttgtgggaccaagccctccacctgtgggatctgattctccaggtgaatagtgtcagaattgaattataggacgcccagctggagtccacagagaattggttcgtgtgtgtgggaacccacccccaaccccaggtgtcagaagtgttgtgttgagtgacatgtgtatcagcgtggaggaagaaacactttggtttttcttctctctcttgtaagagtccttgttttatttatttccttcacccaggtctcagtgttctcatcagtaaaaagggataacacgcctcacttcaaggatggttgtgaggagtgaagacagagcctggcacacggtggggattagttcgtgatcactagtctgcttagtgatgaattcaagttcatgctcatgtcattctcttagggacatacagcacactaggggaggttaaagatgcttgcacacatgcccacaacacatctttgatggtttcacagtgttctccccgcagcagtgttcctgaaagtccaggtcatacattgcagtatgtgactctgccaccagagaggggcctctatggagaatgaccttcatgaggtgctgccactgtggacctaaggccgagcgctggaggcacaggccaggcggctaagctccagggagaagtcttggcagaaaaatactgggaaatcctaggagtcgagggcacagtcaacgaaagtcccttcctcacgcagttgtcatgtggtccctttaaagaagcctgagcctagccaggcgctgtggctcatgcctgtaatcccagcactttgggaggccgaggcaggtggatcacctgaggtcaggagttcgagaccagcctggccaacatggtgaaatcccatctttactaaaaatacaaaaaaaaataataataattacccgggcatggtggcaggcgcctgtaatcccagctacttgggaggctgagcgaggagaatcacttgaaaccccgggagtgagctgaaatcgcaccattgcactccagcctgggcaacaagagagagattctgtctgaagaaagaagaaggagaaggagaaggagaagcagcagcagcctgaacccctttgccctagaatggtccagaagcatagtggggattctgaaaccaactaactgtccagaagcctcaggattgctcaggttgttgaagtcaagtctcctagagtggaaatggacaaacaacgtggtttccgtggcccacatttacttatcctgtcttccattttctaagacattaaaaatatgcatcaacctagaccagtgtcctaggctacgtcatgaggcaccctctgaagcagaaggtttcactgtggaatacaggaatgaacctaccaggacataacaggaccagaatgttaaagaatagttgtaaggaaagtgcatcattgcacccaattgtgacttcccttaaaaagctgctggttataatgaaacagacaagacaaagtacaccagagcagatatcactacaaacaatcagagccttggctgctgtaattgtcacggctccataataccatccttttctaagaagttgagatcatttgcagttgtgacttcatttagccatacaacaagcctatccataggtgggctattatcattcccactatgcctcatgcaatgaggactgcctcaaggttacctgggaaattggccataaagacgagactggaaacttagttttcattaagttttcactttcatttttgaccaattacagcttgccaccactggcaaggctcacaagacatttggaaaaatgccatccaaatgtgaaaatggcaatattaagccttcggtgcttgaaacactctccaaaagaagattgtcttatatcactaaagaaactgtagaacatctctggctaacacacatgccaaaagccctgaggtctttcacgtgtcataccatgaaaataaaattttaaaaaaagataagaagaagtagtaaaaatgaggagataaaatcagaaacattccttttcaacaaaacagtgcaggtaagggtgagagcagttccttctggagccctctagtaagaggtgttataatacacatgagaggaaatcaaagaaagggaagacatacgttgaaatgatttgccttattaagacatctaattttaatctccagttaactgcaatcttcttcatattgagtgtacttttcagtgacaatcaagcaatctgaagcagctggagttcttcttggtcaacgcatggacctccaacctttcaggcattcatgatcccacatgattgacagaagtctccactcttgagctaaaaacatgtcagcctgttgtaatatgaagcttctttcctaagtcagaaaagttaatgacaaatgtaatcaaaacacagttttaaaataaaattgaaagcatctctctacagcattgattttagagtttggtttctacctggcccagtaatgcaacgctttcctagcagacacctcaagacttcagggcatcttgggaagtgggatggagccctagacctggctttgagggctggcgctgtgcaatcacctgggtgacctcacacaaaccccagtccctatgtctagaaccttcatcacaaaggaatgggccaaaccagaagacttctgaggcccctttcttgaactttcacctgcttataagtgaatttgcttgattagactagacatcatattgagaagccagaatagagaaaaaggaaaaaaaaatagactagagaacatcactgcacacttttttggccacacctggagccagcttgtgtccccctttgtgacatgtgcctctgcatcagcagagaatatctgattgaactttgcacgccaacagaatgttaaaggcctttttacacttactacattgccttgtgattatttttttctacctcgtcatttccccaatgagactatgagcatcttgggtccaggaacagggtccctcccctttgaatcccaggggttcagctgagcaggacactgtaaacccctgataaatggctgttagctgtctacatacattatagcatgttgtcacactaatataacagaatgtatttataaatatataaatatatttcttatataaatgaatatatttataattaatatatattttgtttttaaaattaatctaattagtcataatccaagataaccttcctgtttcttaaaaaaaaaaaaagacacagtcctgaaaaaaatctgttccctggcaaaaaaaccccacaaacttgcacatcaattaattatttttcttcttatttttcttttcctgcttctacccctgcatcaataaatttaagcaggcaagataatgaaacccattcatcttatattttcagtagaatgttgaactctacggaactcaaaatatataagcaagactgaattcactttttttttttttttttttttttttgagacagagtcttgctctgtcacccaggctggagtgcagtggcgcaatctcggctcaccgcaaattccacctcccaggttcaagcagttctcctgcctcagcctcctgagtagctaggattacaggcatgtgccaccatgcccagctagtattttagttattatttttagtagagatagggtttcaccatgttggccaggctggtctcgaactcctgacctcaggtgatctaccctcctcggcatcccaaagtgctgggattacaggtgtgagccaccatgcccagcctgaattcatttttgtaacaattttgaacaataagaagttggaagatgataaaaaacctaatcatttaaatatctgatccttgctggaacccataaatcaattctagaactctggactttcaattcactgaattagtaatttctttcttagtgtctgtctttttaaagatgatcactttatagtcaataatagcacagatccttttatttcattttgtaaaggcccagtttcattagaagcacagaatgtcatgtgtacaaaagaagaaaacattctgatgaaaatttttatttttaacaatctgttttccagctgtccaaacaactagtggccaccagggcacccgcagtctcctcccttgtgtccctgaagctcatcaagagttgctcaacagcccgcagaaccacgtgcctgtctcattgtccttatcttcccatttcaaggtttgaaccaacccttgagtacagtccttaccgagtcagccctgagtgccttagggaaagaagtgagaccgggcatatcccctgggaggggaaacatgttgcagcacatcatgacaaaaatatcaagacagaagtttataaaatgtgctaggaaaatcgaaggaagagggtgggggtgggaaaacttcagagaagcagcgacaacttgtgctggacctgaaggatgaataagagctgccagaggggacgggcgcggtggctcacatctgtaatctcagcattatgggaggctgaggtgggaggaatgcttgagcccagcaggttgagactgcagtgagccacgactgagctactgtactccatcctggccaaaagagagagccctgtgtcataaataaatgaataaataaataaatttttaaaaaaatgtttgccagaggaagaacgtggtggtattcaatccatgaagtacaggaggcttgatgcccatcattttgagggaattctaaaattttaagtagtgaaaagtggcagggaataccgtgggatagggaggagaaacagaaaggagagcagtgaatagtggttaaaactagtggcaggttggggtagactggaacagagtggagatttgatcctgaaggcagtaggaagccactagaggtttataagcagtgcgggtaaatggtcccagttctgttcagataacaggggagcagaaaattgaaaagaggtgaggagacttgggaatggctaaaacactagctgagaagccactgcattagtcccagggagaaatgacgagggcccaagacttcatccaatgctgaggcaatgggaacagagagatcccgacagatgtccacatgcagagcacgcagcaggtggtggagactgatgtgtgtcaggtgaagggaaaggaactctaagaaggtacttaatcatttgtgaaactgagagaagagtcaggaagtcaatggagatgtggggactacaggaggagaaagaggtttgggagggaaaggacgggatgagtttgaggcatgctcagcttaaagtgcctaatggtcagtctagcagagatgtctgcctagcattagagaatggatctggagctccagaaaactgatatgggatggatcttgtattctctcacacaagaagacaaagttcaattttgattcaagagatcacagaaccattgtaattgcaaaacaatggagcaatactccttctattgatggataaaagcaggaaagctaatctggcagctgaaaaagatggcccagtgccaggtcagactgagacattttttggttttgttttaggggttctttgtgttttggagggaattgcaattttatttccttgtttgttgtggtcatctagatattaactgtctcctccccctcccaaggatgtactcaattcctaggatctggtatagacttactaatcactggtatgcatctttttgtctgcctggaggcgacaagattgtgttttgtcacactggttacaaggcgaaagggtaaaaagaaggcaattaaaaataaagttataatataaattgtactgcttctctctttgaaggacttcattagacctattaggagagctgtttgatatggttgagcagggtgtgcactgaatatttgtagaaatgaatatttattataaaaaatttcaggtagatggcagaaaaataccttaaggaagggggcatctttttctaatttgcacaaagatactgtctgggctactagaaactctccctgctgaagatggttggctgctatgaaacataacagcagtaacatacagtcatgtgtcgcttaatgacggggaaacattctgagaaaagtatcgttaggcaactttattgtgcgaacatcatagagtgacttacacaaacctagatggcatcatagagtgacttacacaaacctagatggcatagcctactacacacccaggctgtatggtagagcctattgctcctaggctacaaacctgtacagcctgttactatactgaaaactgtaggcaactgtaacataatgctaagtagttgtttgtctaaacatatctaaacacagcattcatgtttctaaacatatctaaacatagaaaaggtagagtgaatgtgcagtatttgtaatcgtatgggaccaccgtcatatatgcagtcaggaaatgtcattatgtggtacatgactgtatattcatttcacccaggaattagaaggctgaaaggaaacacaatccattttccagttgctggaaccacactaagaatatcagcctggaattcagtctttagccagtttgaattgtgaacaaatacaattcaagatataataatcaggcttaaaatcttgttgtagtcaagtgcaatgctcttctaccaaaagagaatgtgtagcatctccagtttctgcttatatcttgtggaactggaaaagaaagccagaagatatcctgacttactcagttttttgctaggattcatacatcaattccttaagtggaagatgttctcttacatgaatgtgtagcatcaagaacatcacaagtaagattttaatgtggttataattcattccaaagagagaaatactactcaaatccattacatctgaacttgtttgtttgctttttaatgtatttattgtctgctgtaagctcctgagaagacagaggctctatctcatttattgccaaatccttgttcctagaacagtagaatagcagatgctcaacaaacctttctcttgttctggctaagcaaatttatttagccttttaacccaagatttaaaaggatttagtcagaatgaaaagaaatcaggaacgggaccaatttaaggttatactgataatcacatcggtaagtatggtgaaaatttactgagcaattactgtgtgcgaggccactgttctgatggcttaaatatgtggacccattgaatccccacatgacccacagaacctcatgcaggttaagaaatttccgccagttcagccagagggtgagtggcagagcttgcattgaaacttgggcagcctcactctacagcctgtgctgttgcccataacaggcgctttagctgctgcgtttgcctgaatgctaatagccttccactccctttattaccttgagactgagcagtgtggacaaatgcaggtagctttcttgtccttctttcaagaatgttgggccaggcgcggtgtctcacgcctgtaatcccaacactttgggaggtcgaggtgggtggatcacctgaggtcaggagtttaagaacagcctggccaacatggcgaaaccccgtctctactgaaaatacaaaaattagccgggcatgatggtgggcgcctgtaatcccagctacttggaaggtggaggcagaagaatcacttgaacctgggaggcagaagttgcagtgagcggagattgcgccactgcactccagcctggccgacagagggagactctctgtctcaggaaaagaaagaaagaaagaaagaatgttgtacctgtacatttaacttgttcaacagtcattttcccaattactccattttgctagtggcaaaactcctgataagcagatgttctgtccctgggcagtttcctttggaaactacttggtgtatggaagcttcacacccttagttagctcaaatatggctccatgcatgcatttcgaggcctgaggatccatttcagcccaccattttgaaaatgctcatacaatattagcttcaatggggacaagggctttgtttggttgacgctataaacaaacagtagttggcaccaagtagaccctcggaaaatatggaatgaatgaatgaagccatgccctgagagccctgagacaatacgtgacacgtccataccccaccccctccagtcaacaagaacgagaatggctatattacttatctgcattttattttagagcagtaactgactatggaattacaatagtgtcttttttccatcttcttcaattatatccatagttaaaatataattaaaatttcaacctcacaagatttggaaagatgcaaagtcagtggcttcctctgaggccttagctaccccttgtccagggaaaatgctggcctctggacaactgaatcctgacgagaacacttgcgccggtcctctacctgaattgccaaaagggcccgcagggaaaggaaggaatcaccatgtttagggcgccctcttctgttcaaagggctgaagcccgtggagccagggcaaggctttcagcggatgagcatcttggagcaaacgtcagagaaccacatactttcattcctggaaagggctttagagatgactagttcaaactacacattacacatgggaaactgaggcccaaaggggtcaaatgcctcatccacggtcacacaattggttaaatctcgaaagaggaagaaaccggactccctggcccagacccctcagtaacaagaggaaaatgaactcgtaactccagtctcttatgcctttgtaaaaatcaagaaaaattaatcacaaatctatagtgccaatttcttacgatttataccttcaacttcctgtaatgtcactattcacattttcaatacgttaacaaaggttccccaagcatagatttccttaagaatcaaagagagacttgcctctatttttttttttttttttttttttttttgagacggcgtcttgctctgtcacccaggctggagtgcaatggcatgatctcagctcactgcaacctcagcctcccgggttcaagccattctcctgcctcagcctcccgagtagctgggactacaggcacccgccaccaggcccagctaatttttatacttttaatagagacagggtttcaccatgttggccaggatgatctcgatctcttgaccttgtgatccgcccgccttggcctcccaaagtgctgagattacaggcgtgagccactgcgcccagccgacttgcctctatttagtccagccattcctttcattatttttctccacaggcctcatatttgaaggtttttagtctaccaagcaagccacacttttagagtaaaaatgcattttctcatttaaaaaagtacagaaacaatgaccatgtatgagacgttacgctactgatattatcaaatgaaatttaaaatgtgaaatgcttgaaacagtgattgatacattataaatatgccagagatgttcgctattataattctacaataacaatcaacagtagaaagaaaaaaagtacttttgttagtctgtgcagccctatgcaagattaatgtatcatttcaatttgatattttgaaatactaaaaataatagtggagttcaaaggtaattctggggatacctggaagccaaagatccctaggttggggccaactgctgtaacccattaatctcccagcctggggtggggggcttactctgcccttacatgggattgtgatgctctctcatctagtgcgttgatgtgggtgcctttgtatgaagggtgtgtccttggcagtccttcaagccttcttgctactccactaaaacaaacatatcctataaacaaattcttacagatagatagctggagcctaataaggatgtgttgaatgtttgcaactctttgctaagaccacaggcttctaaaaggaaaagaaaaaaaaaagctaattccatttatgtgatgttctagaacaggaatcactaatttggtgactgcctttgaggcaacagaattgagtttgactgggaaggggcatgaggaaaccttccagaatggcggggatattctcatctcgagaagggtttgggttttatgggtgtctgcatttgtcaagattcatcgaatagtacacttaagatctgtgcattttgttgtatgttttaaatttaaaaaaaaaaaccattgacaaatactgaactctaatgacatgtatgctgaacgatttaggggtgaactgatgtctgcaactttgaaatgcatcaaaaaagtggatgaactgatggatggatagagggatgacagaaaatataacaaaagatatatagtaaaaaataactatggcgggcatctggatattcactgtatgattctctcaactttttttttttttttttttttttgagacagagtctcactctgtcacccaggctggagtgcagtggcacgatattggctcactgcaacctccgcctcccgggttcaagcgattctcctgcctcagcctcgcgagtaactgggattacaggcgcccaccaccacgcatggctaatttttgtatatttagtagagacagggtttcaccattttggccaggctagtcttgaactcctgaacttgtgatccacccgcctcagcctcccaaagtgctaggattacaggcgtgagccaccacgcccggccattctctcaacttttatattagaaaattgtcacgatatgttggaatgaaaacaattaaggtagatgtaatcatttattacctttaaacatgttatgccaacttattcaatgttcaagcttctgctttgtaaaaggacatttttaacagttctaaccaaagaaggctgcagagtggaaagctaataccttggtggtactcttctccaccaacatggctggatggtaattacctgtgacacatccttccctttagactctgtgctgctggagggcagggagcatgaggcattcatttcatgagccatgtgtttgtggtgggcacttaattaagatgtggtaagagcagagtttctgagtcagaagggttcagatttgagttctgcaacttactggctgcatgaccttaggcaacgtactcactaacacagagcttccatgtcctgtccgtaaaaaggaagtcatctccatttggctgtctggagggctcagtgaggtgatgtgactaaagcacagtatctggctcctgaaaagaacttcaaaaatagtagcctgtgcctgagactgaggcagacctggatctttgggccctaacagaactactggaggacaaattcccaaaggaatcactaaatgatggctatttcatttcatcaagactgaggtatcatgtcaacccatttctaggacaaaacttcagctgctgtcttggtctgctttatccacacctgacctgtcacttacaatgtacattctgaggaccaacatctccaaacattgtcctggggcaggagcatcctccttactagaaagctcagggcctctgaatcagaatctgcatcacaacaagatccccagaatactgaagtttgagaagctctggtctacattagatggttttctaatggctccctgttgccactgataataaagctctcttgtctttaccagagctacaagtcatccctgactctcttcgtcttccttattgcccttaatttcttcattctttaggatctgccctcagtgctactggttttattgtcattaaaaaatattaacgcaatgctcagacttcctcaattatgaatatggtaaaaaaaattaacttatggacaatctattctaaaaatactaaatatatggacacgtggatgcagcactgtagtcctccttattcacagttccactttctgaggtttcagttacccaggggcaaccacggtctgaaaataggcgagtacagtacgataagatatttcgggagaccacatccacgcaacttttgttacagtatattgttatagttgttctactttattattagttatgaatctcttactgtgcctaatttataaattaaaccatatcttcagtttttttgtatagcaaaaaacatatgtacagtatgtgggatttggtactatccaaggtttcaggcaaccagtcttgaatgtaaccccccatggatggcaggggaggggaactaccatatttaaatttttaaaaattgataaggtttcttttctcagctggtaggttttgtgttgttatgattttataagctcagccacatgcaaaatcgagtcaagacaccttggccaggcaggtgaggaagcttatgtagccccaaccttgccttctgccactctgcaccccatattcccttctccaagctctcacagctctctgcacctctgaatagctctggtgacactaggatcagtgatttgcctgtccttctctcactgctacctgaatactgtattttctttcataaaatagcatcctacctgaatgcctagtgctgactggaaaatatggagggagtgttggcattggaaattacagctttgtaactattagggtaaaaactagtctaggcaagaatcattaatggatgcacagtcttaaattgtctcctcagagatggtcttagaaacgaaaaaaatagtaactgtacaaggcagaaatcaggcactaccaaatgtgatatccctcacacaacccccaaataaaacattcagctaccaaaaaggaggaccctgttcttaaaagacagaaaaacaaaccctaagaaaaatattccaggttaaaggatactagaatcatgacaactaaacctaatcctaggctggatcccatactagaacgcaaaaaaaaaaaaaagttataaaacacattatcaagtcaattgtcaaattagaataccgatgataggttattaaaagtactgcatcagtgttacatgtactgcacctgcaactttgttacgtttgaaattattttcaaataaaaggtttaaaatttacaaaaaagtatttctttctaaattaaaaaaataaccatttcaatatataaaaataaaaatatatttaaatataaaaataaactacccaaaggcatgtttctttaaacaggtaaatcacgctatcagtaaaaaaaaaaaagtgcaatagagcagccgggtgcggtggctcacacctgtaatcccagcactttgggaggctgagctgggtcaatcacctgaggtcaggagtttgagaccagcctggccaacatggtgaaactctgtctctactaaaaacacacaaaaaaattagccaggcatggtggtaggtgcctgtaatcccagctactcgggaggctgaggcaggagaattgcttgaacctgggtggcagaggttgcagtgagccgagattgtgccattgcactccagcctggtcaataagagcaaaactctgtctcaaacaaaacaaaacaaaacaaaaaaacaaaaaaaaaaactgcaatagagcttgtgagaagctgccaggaacaaggtgaaatggaacatacattggaggagaataaggaagcagcaataatgaatcctggccaacaggtactgagccccaaatcgcttcacaagtattatcacagtttcactgctttccaatgtattcatttatgcctttgtgtttctttttgctatattttttcaagcttgggttgaagactttgtttccttacctcttaaattttttatttcaatgataaagtcattaaatacaatggatttgctatgatcagaattttggttttcatacatagtattcttgttttgtttctaatgtaaaacaaaaactaccaaggcttaagaaaagaagtgaaaaggttgagttactacacacaccactgaaaaagtttcacaagttgttcactgagggggaaatttcagtgtttttaaatgttaggaggtagagtttcattgtggctgtgttcattatggattaaaaactagcactctggataggtcagaatgaatccatagtactgttacataattggtttaaaaggttctatttttcagaggtcaggaaaaattattgagttacagccaagtagttttgccctactagggtcactcaaagtttagagttcttaacagatatagctgaggggagatggcattgctttattattttctaagcaggtgctgctgtaaatggaatcttttccttttactgtctcttcttttgctcttttctttgcctaaaatgattggatgaccacacaaatattagccaagttatcaggtttccagttctacatctccatgttgttttttgtatcattctcacatgatttgtttctatcagagtcacttcaatttctttttgatacagaatcatctgtggttagaactgatgagttggtagctctgccaaagtattaataccctgttaacaacatacttgacagcagcaacaattaggaacaaagacaaaaatagtataactaaaatttgcagcgactccttaaaccaacttcctacttggccaaaccaagcaataaagaaaatccaacagctgaatgtatcctttctgggacaacaaatcggcctgttttctgaactttattattcagaagcaggtattcaaatacaatcagaagtgacagccagcacacaaatgccaccttgtttggtccataaatatcccaaggcaatgcctttgtataacatctttgcagcaaatgatgtaaagctcttctgctgagtttgtatagtagacgcagattacacatgcagtaattgccattgtaagggacaggcttcaagtgtatcttactaaattcaggcactcagaaccaagagagaaactcgcacacaaaacaataaaaatcagtatctccaactactcctgagaagtctgcacttcaacaggcacattgatgagaaagaattaagtcatctgagatctcactagggagtgtagatacactaaatcaaatattgacataaaaccatttctcaggggcagactccttcttctttccaacactgacattgtgtggtaatcataccttggcatgaatacctcaagccaggaaggatataaccagagtaaatttggtacattctttaagtgtatttctcagatggcagggggctgatgtaacaaaatatgcctgcagttacaatttaaaagtgtacttaattcaaccagcacaaggacaccgactaattgaatataaagagtataattagttatgtcccataatcatcagaacaatgtctttacagaaaaggtaaaagaccttgtagttgaaatactcatgttgtatttccaagaatagtattaccaatcacatatcttaaaattttttaaccctttaaactaattttattttacttcaaaactggttactgaatatcattaacctttgaggtatatttctgtgagttaagcagaaacataaattgactttttaaatggatgaaccttattaaacttgcagctgatttttttgtcaatattctaataaaaggaacctcgccagcatttcagagaaagggctacaaacccaacaaccagttaaagttccttatgtaactatggtcttattgattataacaaattagctgcctatgtgaggatttgtcctagatctaggatagccagagaaataaatataaattttgtgacttacagtagttatcaaattaacgtgttctgctgaccatgatggaataactggtatcagatgatcattcccattataaataaccataacactggggaaagtataaagcaactattttcaggccctggactataggttgcacaaaattgtgatccctgagagatgggaaattcagaaaatgagttctacgtttgccctggctaactgcttggggacaatttcctgaccatgatatgggatggtgggggaaagacacactagtctcactgagatgaggaggcaaaaaagactttagggatggtgaagcagatgacactggtagggtaggtctcagaaaggaggcagctgtgcaaagaggggaaagcccacctcagctgaagttgagctttgcttgtgcagggtaaatatgcaatgattaccagaaaacagctgcttgagagaagaatggaaatactagaagtttagcagggctggcgagtgtaggcattccagcccaatcagaataaacaaacctcattaacacctcaatcattcagctgagaaaccagagaggccatgccataaaataaggaccacatcttatagtaaggtcttctcaagatatgctctaactggaactaaattaaggacgtaaaaatatctgcatgggttaaagaacttggagtttgagtcctgcaagttagaggagcctggtaaacactttgacctttcaaagatctatcctaacaaagaataaaatgaagcctgcacaagttcaaaacattcatccagtaattaaactgcctacaggtaaaaaaagcactttcagactaacgtaagagaatttagaatcatgccacaaaaaatgtcctgcataaaaaaactttaaaattactagacatgcaaaaaaacaggaagtgtgacccactgttaagaaaaaaaggcagtcacagaaatagatcctgagatggtccagaggtttcagcacacagactttacagaaactagcataaacatattaaagaaaaatacacacatcacaaagaaacaaatgggggtggaaatctcagtggaaattattttaaaaagaaacaagtgggaattctagaactaaaaatgtaacaaataaaaatttaaaatttgctagatgggcttaaaagattgaagatggcaaaaggaagtttcagtgaacctgaagacaggtcaatagaaaccaatctggcaaacagaaaaacatactgaggaaaattggatagagcttcgggaacaatatcaaatggtctaacatacgtgtaagtggagactcaaaaggagaagaaattgagaaagaattatccaaaatgagaagaaactgagaattatttaaagataatgatggctaaagttcctaaatttaatgaaaaacaatagctgacaggttagagaatctcaataaacctcaaactggattaataccaaacaacaacaaatgatttagacacatgaatgtcaaactgctgaaaaccaaagacaaagcaaattctcaagagcggtgtgtgtgcgtgcacacacacacacccctatctacccattctcaactataccaaaacaaacaaacaaacaaaaaaacctgaccttccctggggaaatatgaataacctgtctttattttcaagttcaaaaggcaaaagtcagctatatctggcagctgctccatgcactgccttacctgcatgagggatttaagctgctcagtgggtcagattttaagctggaagagaagccattatcacccagtgagaccagattgctatagttttccagcaccatctcccagtataggtccttctgagcaggactccacaggcttcatacctcttagatgaaatccacagccacaaccttgaatattatgaaaaaccattatgccaaacacagctccgctcactctgttgacatgtgtgcccatgttgaaaacaagggagcaagagggctgccttggggaagataggtaaaatatctaggtcctgcttttgactgtaactctggagcttggattccaagaccattaaccctattcactatccaaccagcatcacttgctgtgatcctagtctggctattatgggctttacaaatgaaaacacaattcctaaccttgaggtgttttacatttaatagataacatattaaaagaaaatataagtatagaatcatggtctttctgagatttaggaatttggagattctttaatctagctgcttatattcaatttaaagatctgagcccctgattggtttaaagccttgttacccagtctggtctgaagacaagcagtaccagcatcatctggaagcttattagaaatgctgatgcttgggctccatcaggcattctgattcagaatttgctgcttacaagatcccaagtgacatgtatgcatgtttttgagagcgctgggttaaatgatctaccgaggtatatggttcagaaatagcaacaaccaataactaaacttctgattttccaaaacaagatctctcttctacattattacacaacatcttcccttctcaagaggaaaacagctctgttatgaataatggatgcccaggctccactgcaaactcatttcttggggtggtgttcaggcattgtatttttaaaagcttccaagtacagccagggttagaagagtctcaagtagtcactatagtatagtgatcagggaaggtttcacgaaagagagctaggtatttggtcttgaaggaccagatggattcagaggagctaagggtattccagatgaggtatggcatggagtgggtgggaaatgccaggagaaaaagaggacatggcagcaaagagtgttttagaaagcaggcaatccagatttctagatggaaactcctaattattaaatgctgaggtctgtcaaagatgaaactggaggctggacacaccaaatatctgtatgacagagctgtacatctagacggtggacatctagcatccctgtctatatgcaagtcagctggctgcaagaccacgtgctgctgaaaatctcactgtggtcatgacagtccacccagtggctcagaccctgagattctgttcacacttcctacactcttccttactcgtctgtgttcttccaactcctcatcttgcctaattcctcaggcagcacctcatcctgtaagtcttcatttccaggcttaagagatgtcagccatctgtgtctttattgtacagccagcacaagtgaacacttgaacacaggcatccctgcattgttgttctgaacctttatgtgtattaacaactaatttcttggtgatgactgactcatgaggcagagaatgatgttgagggatgaatccaattgacactggacatgtctccggagccaggactgaactgaattcacaataaataatgtagcctcggggtaccagaagggaatggattcaccctctgagagctacaaaagaattttaggaaattctcatctccctggcccttcagacagtggtcattttcttggtcttccaagagaatgacaaagtttcagaaagcctatctgaggaaggtgaagggcagtgagagggtgcacgggtggaaaagccctctcaagagtgacgtgggccttcccctcgagctccccagatggggcgtcccagatggcaccagcgcaatcttgttctcaaccaggatcccggacaaagacctagagatccaagccgacggcaggccaagctctggcccgagactgaggcttctgcttctcaggagatgagagtttaacaataacttcgtggatttcaaaaagaagaaaaaggtctcagggcaccggaaaaggtgtattcgggttgagggcgtgggctcagaatcgggtctacctcgtacgggatgtgagacttcaggcagactgctcggccttttcaaggctttaaatggagctaaagggtatacgacatgacgttcgcccggtgtttaggaatatggggcgtgactttccaagcaggcggctggagccagggagaccacaggccgctgcaacacaaaccagcacctgaacaagcttggtcagccagcggtacacctccgccaaccccagaagccgaacagatgcgccccgaaacgtcatttccgcgcgccaaggggcggggccggtaccgggtgcggaagtcgctccaggggtcactgggaagtgtagttttcgagacagaggcgctcagaaggagggtcacagtagggccaggcactcttctcgggagctcctacgtgttttatgcacgtggttaagaaaaaagagggagaattcaggtgccacagtggccattctccggtgaccggagcgtgttactcagaaacggatccgtcagaggccaatgggagctgccggccttcagggcgcgcctggtggcgccgagcatcctgggaggtgtggtccgggcgctgtgccgaggattcggggtagtgtagtcctggcgccccgctggaggagctccccagctggtggctggagcgaccccttgttctttggtggcgctggtgagtgaggctcccgcgggacccttgccgcagccgtacccttttctgcgcgaaaaggaaggtcccgaaaggctggactatgggctgaatttggggaccgtgcgggtggcgcgggggtggtgattgtggtgggaacgcgctggcgtggcgcaggccgtcctctcccagatgtcttattttgggggtgtgggcgtgcatctccaggggagttgggtgaagcccatccgtgaaactggatggtgatgagtgggggatcgggctctctctcctagggttcttgtgggtggggacaggttcggctttggctgaagtcgggtattgggaaagggagtcgctgatgccataagtccccggttttgggggagttgaataaataagctttttgggggaatggtatttcccaggtggtggaatgggaaccatccctggggccatgtgtccccgaggcattggtcggttgagggctagtctcttggggccacactattcttcggctttgctggagtggaatgaggagcggtctggcttgaccaaacaagccaaggttagactggatctggggtggccattttgccgcgatcttagggtttcactttggttggtcacccccgggttcgggcgttggaggaggaagtctggctgggacgcacaggacaggttttttccaaaggtcccagggaccgtcattgatcgcaagaattacggattcccaggcccctggtgtggccaggctttgggattttacattccatttaagtttttattgcggagaaatttcaaacagccagaagtagatagaactctatagaccagatctccatcacccagattcaacacttaaaaccttatgaccaatcttgattcatctcagaatggacacagagaatccttgcaatccagagttcaccgtcactgcccttactgtgtaagagcacggtctccacagccacatttcctctaggctctgtcactttatagctgtgtcaccttgggcaagatgctgacttcactgtacctcagtttcctcgattttatcctaaagaggataatagcatctatcgtattgggttgttgaaaggatagaatgaggtgaaactcctacagtggctgtaacagtctctggtgtatactaagtgttcagtgaatattacctttcattaataacaggcacagagaaggtcgcttcatgctcagcgtcaacagcatatcagggcaggtcgtgctttcaacctgtaccccagctgtgttcccaggaagctgcccgcagttcttttctccttttcttctgtggcaggttcattcctgatgctgttaaggaataggaggtactgccctgctggagaggatttcccttgattttcttgaacgctttttgttcttgttctgcctccctgtggctcctgtctgcccagagaggactgcctgctggggaaagggggtactcctgagctcctgacagcccagcttcaggtgggtgccacttaccttttgcatttcgaaccatgagtgggtttcttttgctcagctttgacgtctgtgttctacaatgtcccatccagggatcagggccccagctggttccttcaggaaactaggcttgttttaagagtgatcattttcacagggaatatttttcagagctgatgctctcattcattacacctatattcttcccctacattccttctttcagtatttgttcagactgctcattcccagggcttgtcaggtcctgtgaagttgttaacattctgttcttctgtcttccaatactctcacttactcttttccctgctagagttttggcagcaaatcccagttatatcatttcacctgggaacacttcaggaggcatctctaacacataaggacttctttttttaacataaccacaatttcattgttatacagttacattgttacaattatattttgttatacccaacaaaattaataacttattaatatcatttaatatctagcccatattgttttcccccattgttaaaaaaaaaatcttttttttccaccagtcagaacagccctggtcagaggcaggagagggaaaagtatctggaaacagcatcccagttttccctatctctgcctcatttctcctcctatttcttctgatcttgctgatctgtgttgacagccttataacttgatataagctggacctctgagttttccttgcatccttgtttccaaacttacttcccattagaagttgtgtcctcctggccgggcacagtggctcacacctgtaatcagcactttggggggccagagcgggcagatcacctgaggtcaggagttcgagaccagcctggccaacatggtgaaaccccatctctactaaaaatacaaaaattagccaggcgtggtggcacacaccaataatcccagctattcaggaggctgaggcaggagaatctgtcgcctgggcaacagagcaagactccacctcaaaacaaaacaaaagttgtatcctcctattccacctgtgcattcttctcgattccttttctttccctttgtctccatttctgcactgccctagcttcctgtctcttcttcaccttcttgccttgtctttcctcccatttagagctgaactccttgaaagaattatctatgtttgttgtctgcgttgctatccttctgttatgtttcgaatattttagtaaggctttttcaagtgacaccaaaaaatattcttgtcagggttaccaatggtctccttgactaaaggccacaatcagttctcagcaacatttgatgtaattgtttacatcctccttcttaatatatcctttcacacagttgctcttggtactaggtcttcctggttttcctcctaactcatagcctgctcctcctctgtctcctttactggctcttccttccctcccaaatttccaccgtggaaaaggccctgcttcagttcttagacctcctgtcttcttcagctatactgtctccttggttctcccgttcattctcaaggctttaaatgccatctgtctgaggctcagcctagagctctgtgtgcaactcacatcctggtcccctactgtctccttcttcacatttccagttggatttttttttttttttttagtgagacaggagtctcgctctatcgcccaggctggagtgcagtggcacaatctcggcttactgcaacctccactgcccatcttcaagtgattctcatgcctcagcctcctgagtatctggtctacaggtgtgtgccaccccacttggatatcttatgggcatcccaaaactaatgtgtgcaacaagaaactctgattaccttccctgaacatgttccaccccagtggtatatagaccatcctttcaagagtttatcttggagcagaagcatttcagctctttccttcagattgcttggagtcatcaaggagtcatccttgatcctgtcttgctcttataccctcatccacactacggaaatctggactccgacagtttccatgccctgctgtttccaccatggtccaggccaccgtctcatctggacgatcatagcctttcagtgatctctttgtttctgcctatgtcccgctaaggtacatgaatcagtggagcaaatagaaggagattttaaatgtaaatcgaatcatgtcatgtgtttgctcaaaatcttccagtggcttctcatcctaaccaaagtcaaaaccagtatcctacaaagctaggtctgatgtccctacatttactcttggccttcatctgtaccacactatctcagtcactccacaccagccacagtgaactgtccgtcccttggccatgccagcctgattcttccttgcatcagggcctttgcactgactgttctcttgccctagatgttcttttcaaagttattccctgggctcttcacatccttgagatttttactcagtcacctcagagatgccttcccaaatcaccctatctaaaattctaaaacctcaccccacttctgtgactatcctttctccttccctgctttatttctcttcatgccactcatcactttctgatacagtgtgtattttatttattcatgtaattggcccatctttctcctctagactttcatgtcagtgagggtagatttttgtctttgttcacttctgtatccccagggtttaaaatagtgcctatcacacagtaggagcataataaatacttgccaaatgaaggcataatccataggagtaatggatgaggcagactaggatgttgggaaatggtctacagagactggcaggaggcttttgccattgtcctggtgctccaactggtgtaggggtggggaggaattgagagagttggcagaggtggaatccatttgccttgataattggtttgatatggaaggtagagagaagtagtcatgggactgagtaagtgccatggatgacaggaagatgcttctgttatcaggtaagctgaaagagagagggcgcagtatgtcaataaccagcaagggttctggttattgactgctacacaacaaaccactctaaaactgagtggcttaggagagcaactatgttttaatctcccacagttctttgggtttacccaaagcggatgtgatcagctgagatgtgagtgatgcatcttgctatggctgcagtcatttggggactcatttgggttggaacatgcaagatggttccgtcacacatttgacatattttcgtgggttccatcacatattttcgtgggttggctggaaggctggggtcagctgggacagcaggcctcactctctccaggtagtgtaagggcttccagcaggattgaactcgttacgtggtacgttagagctcccaagagtgaaagctgtctggccttcttaggacttaagcctgtaactggcacagtgtcacttgtgtcaaatttattggttaaagcaggaacaaggccaaaatggaagagctcccaatgtttaaagctggaataattataacagcaatataaacagtgatactattgtgttataacccataggataagatataaatccatactgatataaataaataactgaatataaataaatggggagacagaacagctctgacagaggaattctaattaatggatttagaatgaaagggggaaaaagctggaataattttaacagcaaaataaacagtgatactattgtattataacccataggataagatataaatccatattgatataagtaaataactggatacaaataaatggggagacagaacagctttgacagaagaattctaattaatggatttagaatgaaagggggaaaaagaactttgtcatttggtaaacagcacagtaataactattgcagataggttccacagatatatgctaaaattagtggctgaaagtttgaagagaaataggatatttgtataatctcaaagtatctccctcaagatatttattaattataaagggaaatgtagtgactttacaatggagaagctcagaagacacccccttaaccaagtgatcaagatcaaggttaatatcgccagtaaaaagacataacaatatcatgaactcattgatatgttgaaggacacagcatcacatctgaggtattctaaccagaagtgaaaaactcgttctaatcatgaaaaaacatcggacaaaccaaaactgagggatacccttcaaaagcgccaagttcgtgaaagatgagaaaagacagaggatctgtcacagattggaggaggttaaagatccatgacaactaaaggcaatgtggaaacctcagttggatcctggaccagaaaaagtacattggtggaaaaactggcaaaatttaattaaagtctgtagtttatagtattgtgtcaatgttaatttcctgcttttgatgattgtactatcattttctaagatgttaacattagagaaagctgggtggaaggtatgggaattgatatttgtgcaacttccttgtaagtctaaaatttgttacaaaataaaaagttttaaaaatccatcaattctatattcttgagtttttgttttgttttttgaagaaggggtgttgagttttggtaaagagtatcttacatgtagagaggcaatcatgacttctccttacatctattattgtggtgtattataataaaagatcccctaaaattgaaccagtcttgcaatcctgggtaaatttttctttgccatggtgaaatattttgttattgcgatgttggagtctttttgctaacattttaattcgaattttgcttcaatatttgtaagtgacaattagtctataattttctgtttttgaactgtcatcaagttaaggtcctcatggtatccttgctttataaaatgaatgagaacttttccctttagttttcaatgctttgggacagtatttggagcataaggactacctggtttgaaggtttgatagaatttccttgtgaccatctggagttaattttgagagttattcacttcatctaggtctacacgtttatttatataaaggtctgcaaagtagtcttacatgacttttaagaagatgttttttggtgactttgcctttcttatttcttattttgagagcttgttgggaggttctagcaggggagcacagctactcgtatacccttgaccgaagactggtcctcccctatgtgggatggtcatcctccttgactgagtgtgcagcttccggagggatgcacatggagcaatgagggaggaagaggatacccacctagccagccagatcagctggatcaacactggtgatcaatgtggtgacagatgtcgcatccagatcgccctcacatccatgtcacttcttagttgaatatttatgctttctctctttcagttagctagtgtttgtctactttttttgacaaagtaggatttggctcattagatctactgctttctgttcattaatttatgctttcatctttattaattcctgtctttgtgctttcttttgggttactttattttattagctttttgagcttggaatttaattaattaatttatttattttttgaggcagggtctcactctctcacctagactggagtgcagtgatgcagtcaggctcgctgcagcctcaacctcccaggttcaagtgatgctccctcctcagcctcctgagtagctgggaccatacgggtgtgtgtatgcaccaaatctggctattttttaaaatttttttgtagagatgaggtctcaccatgttgcccaggctggatttttttctttcctttttatttgtaaaagtacttaaggctatagtttcccttacctcactgtgttaaataaatcctgtatatacgtagtgttttttattactgttatttttaagtagttctataatttcattttgtgtattccctttaattcctgcctattgcctatgatatgatcagcaacctttttctactttcttcttctcctgtgtcttctatttgagtggcatttctaccttatcaggacacaatgccctataacattagcacatgttttcctcctctttcttctcccccttttagttctaagtttacaattatgtatattaaatgctcatcatcagtctttttgctaaatttcccctatcctgtcttgctttgaatgatgatttttggccagacctttttttttggtggtaaatatgcataacataaaatttaccattttaacatgtttgagtcaatggcatgaagtacattcatattgttgtacaaccatcaccactatctatctccagaaatattttcatcttcccaaactgaaactccatacccgttaaacaatacctccctattctcccttaccccaaccacctctcctcaaccaccatttgactattctaggtacctcatataaatggaatcttactgtccttttacttctggcttatttcacttagcacaatgtcttctaggttcatgttgtagcatgtgtcaatttccttccattttaagtctgaatactattccattgtatgtacgtatcactttgttattcattcatccattgtaagcaacgcttgggttgcttacaccttttggctattgtgaacaatgctggtatgaacatgagcgcacaagtatctgttcgagttcttcccttcagttcttttgcgtatatagccagaagtcgaattggtgaatcacataataattgtattttaaattttttgagaaaccaccatactggtttgagggtataccacattttacattcccaccagcagtatgcagtggttgaatgataatttcaaaaactctggtagaactcatgttttttgtttagagtcactttggattcctgttgttgttctttaaagtctaatagtttttctagtgcatgtcttagagttggtggttatgagtcaacttttccctcatatcccataggccctttcatatttagattcaggtaattgtttttaaaatgttttcttacattatacttttaaatatttccgttgttttggtatctaggaactaattatatgaatattacttctttgtctgttttcctttccagcttctttctctctgatcctttttacttcttatttcacttcattctcttgttttctggctattactaagtgctcgtcatgttttcatttcaatctattcctccttgagtgtcttataagtttgtcttcatttatcatataatattgtctttttctttgatttctttcaaaagtttgttgaaatctttttgtttctttactttttttgtccatttctattcttagtttttgaatttttaatttatgatctcatatttggggtatatctcatatcccaaaatgtttgtttgaagatatttaatgtagcttaatgttacggttttttaaattttttttctgtctcaccattttttttttggtggaattttctttagttgaattgtttggattctcattttcattttttttaatagactacaactgtttgcgtgtctgcatttctgtaaacagaactgtcagattctagtgtttttgagatttccctagttcaggaaaatgcttctggcagtgtagcaaagtacagtttctttactggattgcaggggaaggagaggtggtgcatcctttggggtttctttgttgttgttttttgtttttctcttttgttttggaagaccctggattactctctcttgcttgtttttccttttcctttgctgtttccaagcagtatcttttccttgctttatactttccccattatgccactgcgcccccagttgtggggttaaagagcaggccctgcttcactcatggggagagcatttctacctgacaccctcccatttctgttttccttacccagatctaccttctgagatatcatccttcttcagggagataaggaaaaaaagccacagggtcccggagagccaggggaatggtgagtgtttcctgtctccattactggctgtaacaggatggacacattcccttctcttaccctgactgccttattggtgcctagtagagttcagctccaattcctcttacttgctcccctgcctcagcatcactttctgcaaaacccatgacacagttattcacctagtaaactgaacaacacacaattctacagtatgagatagagtctgcatttctttgttcagcttcaaaagttctgctgcctgagagtaacgtcacagtaatggaacgggaagattctggaatctgtgtccccacctagacaacgattatactggcaggatctatcaggtgtacctattttggaactctggagtctagttgaaggcctccagttcccagggggaaggaagcatggagggtaagtcacagctaattttagctcttagtatagtagcagctacctgtcatccaccctgccagccctatggcaggtagctgtcctatattcctagatcagcttctgcatggcttgtgggagacatggtggacaataaggaccctttactccaaatattgaggatctgtgttctgattgttaattgctgtttctgatcacagaggtggtccacttaaatcccctgaaagctacttcagccaattgcaaccccccactggctaaagtggcttttaggggatttaaggagccagagtctgttttcccccactgaagttctctttttcccctttgagagcgaaatatttgaggactagtatattgaaaagcaactgcatatgggggaatgtagaaggtatacccatggaaaggcacaggctcagaaaacacctgagaagaccttaagcttacacctcaggctgattcttagcatggagacaccctacatcaatattaaaaacaaaacaaaacaaaacaaaaaaacaaaagggagactctaacagagttgctgctttataagatttaaatgtccagtttttgacaaaaatcataaggcatacaaagaatgaggaaaatatgacccattcaaaggggaaaaaaaatgaataaactgaaaacatccctgacaaaggccagatagtgtacttactaaacaaagactttaaaacagccatcttaaagagctaaaggaagatgtggagaaagtcaagaaaataatgtaagaacaacatggaaatatcaataaacagacagaaaacataaaaataaaccaaaaataaattttggatttaaaaagtacaactgaaaagaaaagttcattagagggattcagaagtagatttgagcagacggaagaatcagcaaaccaggagataggacaattatcaagtctgagggacacagacaaaaagattaaagaaaagtgaacagagcctaagggaactatgggatactatcaagtggatcaactatgccttatgggattcccaggagaagacaaaaaagggacagagagattgtttgaagaaataatggctgacaacttcccaagtttgatgaaagacttgaatataaacatccaagcagctcaatgaactataagtaggaaaacctcaaaaggactcacactgagaaacaatgtaatcaaagcatcaaaagccaaaggtaacagagggatttttgaaagcagcaagagaaaagcaacactacgtacaagggatcctcaataagattattagcaaatttcttacgaaaaacctctcgggccagacgtcagtgggttgatatatttgaagtgctaaaagaaaacgaacaaacaaaaaagcctgccaatcaaaaattctgtatctggcaaaactgcccttcattactgaggcagaaattaagacattctcgataagttggtggagattacaaccactagacctaccctacaagaaatattaacaagagtctttcaggttgaaataaaaggactttagacagttacatgaagccatataaaaaaattaagttctccattaaaggttaatacacaggtagtaatataagctagtattactgtaactgtgctttgtaacttcactttttgttctctatatgagacttaggagactactgcatttaaaaaaaaatagtctatgtttttgaccacacagtgcataaagatgtaattttgtgacatcagtaatgagttggagatggagctgtataggaacacagtttttatatgctattgaagttaagctgatgagttcaaattcagtttttaaagtttaggacattaagtgtaatccccttggttaccacaaagaaaatatctgtaggatgtagagaaaagcaagtgagatgggaatttaaaagttgcattgaaaaaatcaaccaaagacaaaaaaaggacagtaatacaggaaattaagaataaaaatctgcaagacatgtagaaaacaaaaagcaaaatagcagaaatcagtccctccttatcagtaattattttatatgtaaatgctttaaactctaaaacaatttggcatagtggatttaaaaaaacatgatctaactatatgctgtctacaagaaactcactttatatccaaaggcacaaatagtttcagaagaatggaaaaagacgtttcatgcaaatagaaaccaaagaaagtaggagtggctacattaataccagaaaaaatagactttaaattgaaaaaggttacaagagataaggaagacattaatacaaaaggtttactacagcaagaagatatagaaattatacacatatacctcataacagaccctttaaatatataaagaaaaatgggcagcattatagggagtagagttttataataataattggagatttcagtaccccactctaaataatggatagaacaataagaaagacaataagtaaaaaaatagaagacttgaacaaggtgtaaatccaatagatataatagacatattccgaacattgtacccaacaaaaatagaatacacgttcttctcaagtacacatgggacattttgcaggatagactaaatgttaggccacaaattaagactgatatcataagaagtatcttctaccacaacaagatgaagattgaaaccaataactgaaagaaaatttaaaaattcacaaatacgtgaaaattaaagaacatactcttaaaccagtaggtagaggaataaactacaagggaaattagaccatactttgagtcaagtgagaaagaaacacaacataggaaaacttatgagatgaagtaaagtgctaggcaggaaatttttagctgaaatacattagaaagcaaaatctccaaggaacaacctaattttacaacttagggaaccagaaaaagaagaacaaactaaacctaaagctagcagaaggaaggaaataataaacactggagcagagtcaaataaaatagagaatagaaggataatagcagaaagcaacaaaacttaaagttggttctttgaaaggattaaataaattgacaaacctttagctttattgactaagaaaataagaaaactcaaattactaaaatcagaaatgaaagtgaggacattactattgtttctacagaagtaaaaaggattgtacaagagaactataaattgtatgccaacaaatcggatgccctagatgaagtgggcaaattcttagaatgcaaaacctatcaagactgaatcataagaaatcaaaattttgaataagtgtataactagtgaggagattgaatcagtaatcaaaaccatcctgataaacaatcaggccctcctggacctgatgactttgctggtgaattctgccaaacatttagagaagaactaacactagttcttctcaaacttctccaaaagtattgaagaggagggaatactgcctgactcattctgtgaggccagcattactctgataccaaaaccagacaaagacactacaagaaaattacatcatttataacattgatgcaaaaaatttcaacaaaatactagcaaactgaattcaacaagcgtttgaaaagaattatacaccatgaccaagtggaatttattcctgaaatgcaggattgttcaacatacaaaaataaatgggtatatggccgggcacggtggctcatgcctgtaatcccagcactttggggggccgaggttggtggatcacctgaggtcaggagttcgagaccagcctggccagcatggtgaaaccacatccctactgaaaatacaaaaaaattagccaggcatggtggcacgtgcctgtaatcccagctactctggaggctgaggcaggagaattgcttggacccaggaagcagagcttgcagtgagccaacatcgtgcctctgcactccagcctgggtgacaagagcaaaaactctgtctcaaaaaaaaaaaaaaaaaatcaatgcatataaaatatcacattaacagatgaaagaaaaaaaacacatgatcatctcaatgcagaaaagtatttgacagaatttagcacccttttatagaaaataactagaaatagaaggaaaccactctataataaggccatatgcaaaaatctcacagctaacatactccatggtgaaagactgaaagctccaacatcagcaataaggcagcaatgcccacttttgccacttatagccaacagagtattggaagtgttagccagagaaaataagcaagaaaaagaaacaaatgccatctgaatgggaaaaagcgaagttatctgagtttgcaggtggcgtgatcttaaatgtggaagaccctaaagactaaacacacacaaacctattagaactagtatatgaagtcaacacacagaaatcagttgcatatctatacacttaacagtgaacaatcctaatagaaaatgaggaaaacaatttcatttaaaatagcatcaaaaagaaaaaaatgcttaggaattaaccaaggagatgaaagacatacactgaaaactacaaaatactgctgaaagaaagatgtaaataaatggaaagacatcacatgtttgtagactggaaaactatttttttttttttttgaaacagagttttgctcttttgcccaggctggagtgcagtggcatgatcttggctcactgcaacctccaccccccaggttcaagcaattctcctgcctcagccttccaagtagctgggattataggtgctgccaccacacctggctaatttttgtattttttaatagaaacggggtttcgccatgttggccaggctggtcttgaactcctgacctcaggtgatccacctgcctcggcctcccaaagtgctagggttacagatgtgagccaccgcacctggccagaaaacttaatgttaaaataataatactactcaaaccaatctacagagtcaatgtaatccctataaaaataacaatttttttaataaatagaaaaattcatattaaacttgatatggaatctcaagggacactgaatacctaaaacaatcatgaaagagaaccaagttggaggacttacagttccttatttcagaatttactacaaagcaacagtaacccaaactgtggtactagcataaaaacagacttacagactaatagaacagaatagagatcccagaaataaacccttgcatatatggtcaaatgatttttgacaagagtggcaagaccattcaatatgaaaaagactatactcaacaaacgctattgggcaaactgtatatttatatgctgaagaatgaagttgaacccttacctaacaccatatacgcaaattaactgaaaatggatcgaagacctaaacataaatgtgaaaactataaaaattgtagatgaaaacctaggcaaacatctttataactttggatttggtgatgatttcttggaaatgacaccaaaacataggcaataaaagaaaagaatagtgaacttggacttcatcaaaatttaaaactttcattcatcaaaggaagggaatatatttgcaagtcacatatctgataagggattaatatttagaatatataaagaactcctacagcttaacaacaatagaagaacgccccagcttaaaaatggacaaaggatttgaatagtcatttttgcaaagatatacatgtggccaataagcacctgaaaagatgttcactatcattcacattaggaaaatacaaatgaagaccacaatgagataccaccttataccaattagtatggctattactttaaaaaaaacccaaaactagaaagcagtaagtgttgacaaggttgtggagaaaacagaacccttgtgcattgcgggtgggaatgcaaaatggtacagctgctgtggaaaacagtgtggtggttcctatagaattgctgtttgatccagtaattccacttttgagtgtatacccaaaagagctgaagggacttcaacaaatatttatacaaccatgtgcatggaagaatagccagaagctagaaacaaaccaaatgtctattaacaggtgcataaacaaaatgtagtatatacacacaatggagtattatttagccttaacaaggaagtaaattctgagtgcatgcttctacatggctaaatctcgaagacatgctaagcgaaataagtcagacacaaaaggacatatatgattgcacttattgtagctacatagaataaccacatatataatggagacagaaagcaaaatggtcactaccaggatctagcgggaggaaagaatgggaagttattgtttaatagttacagtgtttcaatgtgggatgaaaaagttctggattctaccagtaggtggcttttattcctcctagggggccctccctgcctacattttggctttgtcttcctttgctcataatgtccttgtccctgctccccacatgcctcatctgtagttcctagcactttcttcttcccttgattccaacccattctccaagaccaagttgccatgccctgtcttagaaacccctttctaatctctattccagtgtgtcctccatttggaagtagtgctaagaaaattaaaagaataaaactgggcaggggcatgagaataggatgcaaagatgaatttttggactgagtggccaagaagctccatggtgagcactcacagtctaaggctggaagtttaatgaactgttttctacatttcacaggtaagaaaactgggatactagttggtggcagaggtgggtctgaaactcaggcaccatgattccagggcttcactactctctgcttgtgaccatcaggcccgagaaagccaagccgtaggattttgaggaattactgagttatagtggactatttgatcttttaaattcttaaaactcggaaaatctgttatcctttattgttgcttacattttatatgttgcttgctcttctgtctgcctagatttaaagttcccaaaatgtagggactccattttgtgcacatataccctgtgtggccccccaggatcttgactgtatgggttcacaaatgccactggctggattgagacagggatttaaaagtcttggaacacatggcaccagggtcactgggatcttgatatctcacctgcctcccccagggcagccttatccctgcccctcaccctgccatgggcaaggctggcttctgagtgagcagggctcagttttgtgttacaggcacacatggcattcagggatgtggctgtggatttcacccaggatgagtggaggctgctgagccctgctcaaaggactctgtacagagaggtgatgctggagaactacagcaacctggtctcactgggtaagcctgatatctgttaggattcccattcttattgctgggaattttaggctatgcttgaagcagccatcttgctttgttacttgacctttgggttggaccaaaaagcaactacattttattcgtgtttccccagggagggtctgattttgcagagtggaaaatgggtagatttgttgtgtgtgtgcatatgtgtattgtgtgtgctactctgcatttctaggccttttttctcaggctggggttctcatcctatgttaacttgttttaaatgagaggggtgttcatctactcggcatggaatagaatcagtgtactctcatctgagttcactgcccactcatcccttccatttctgagagccccactcacctcttccaactcagggctttgtactacctttgaagtttcctaggctgtttagctttgaattcttgaatgggctcttgagcccataacctagttacttattttcttttcctgtgagcaggaatttcattttctaaaccagaactcatcacccagctggagcaagggaaagagacctggagagaggaaaaaaaatgttcaccggcaacctgtccaggtgagtgggaaaacactggacaaatgagacatgagctcagcagctcagaggactgggggagaggaggcgttgctcaggtgctggggagggaagctgttcccctgacctcctgggctgctgtttagattgcctgacacggcctcccttccagatctccatcttcattcgagtatggacggggctttcctggtgtctcgtctccttcctccactaggaagccttttttcctcccagtgggtttctcctctctagctcactcagttctctttcatatatatgggcttctttctcttgttactgttttttaaaaagatcatcaagaatatggaaacaactgtgacctacagaaagaaggcaagcccagtgggaggaagaaatctaaaaagccaatagagaaattgaaatggaattctaaaaaaaactgtgagctattcaagaatggcttttacattttataatgttatataaatatctatataatatccttaattttgcctcttaaccatcaaagcctgaactatttactatctttaagaaaaagtttgctggcccatgctctaagggagtacaatacatagccttaactttttatattctattaatacttaatctgggtaaaatataaaatgtaagagcattgcaattacacagttccaatcaccccccctcccaacatcctttgtactataattgtcatttgtattatacactccttattacaatgttaaaatgtttgttttaaatgttcatctggatttgttttctacaatgtatttttttaattaagagaaaaaatagtctttaacttatccagataatttatcattttctgttctttttgtttgtttgaaaatccgagtttacctttggtattatttttcttgaaccttaaggacttcatttggcatttcttatggtacaggtggcagtgtattctctattgcttctgaaagtgtctttattttaccttcattcttgaagtgtatcttcgctcgatgtagaattctacattggttattttttcagcacgttaaagatagcattccattgttctgcctgccattgtttctgatggagaagtcaccatgaacataatttagctttatttcctttggctacttttctccatacttttggtattcagcagtttcactgtgatgtgactgccttaagtacattcttcctttacatgtttttatctgcctgaatctctctgtccccttttgggactataggcacatgtatattagtcctttttatataatcccacaggttatagatcctttccatatttttaaatcttttttttctctctgttctttagactggatgatttctgttggtctgtcttcaagtttactgtctcatttgtcatttccaatgtgctaagctctggccagtgaatccttcatttcacttatttttcagttctgcaatttccattcacttttactacacttttctttgtggtgagatttcctatctgttcactaattataattaaattttactttatcttctttaaatcagacactaagtggataacttattaagtgaaaaagttataggattttgtatactatgcagttgagtttgttgttaaacaaagagaagtgtatgaaagagtatatatccatatgtttatgtgaacatagaagtctgttgttatttaccattactagtggttacctctgtggggatagaattggggagggttggacaaggggctgctgagaatttttcatcctactttgcattatttttaaatgacagacacatagataactttaagaaattatatatgtgctttaatttttaaaattcttttgacagttttataaatgtttgcacagaagtatatattttctttttctgggtaagaaattttctcctcttgtttttattaaattgattaattctgtcttcaaattgagggaccatagcatacataatataaattgtcgctgtttttcaacttgcttgtatccttactgttcatctgttagaaggaatcctaaagctctccacagtcgtaatttatatcaacttctccatttatttctaagtttttgtgttatatttcactttattgttctattaggtatagaaaggttcaggatatttttatcttactcattaatgaagtttttaatgctgaaattctcttagttccatgagctattgtttcctttaacttcctctttatttctttttagtcttagcactgtactttctggtgcatctttttggtattttattgttcatccttttattttaaaataaaaacattgtcatttgggtgttttgcttttaagcagcagcatgtagctggtgttgcatttgctgtcaaaccaagtggtgttaacttttaatagtgactttacttaataacagataaatttcatgagacttgctcaggggttgactgaggcagatgagtaggtgttttactacagcaataggaaagaaggaaggtcagggcaaaggaagtaaagcatctgtattagtcaccttgggccgccatgacaaaatactgtggactagctggcttaaacaacagaaattcatttagttatagttctggaagccagaagttcaagatcaagttgtcagcaggtttggttgctctgagtcctcactcctgaacttacagatggccaccttccccctgtgtcttcacatggccctttctcaatgctcacacatctttgtcgtctcttcctcttcttaaaaggacaccagccccattggattagggcccacccttacgaccttatttaaccttaattacctctttaaaggccctgtctccaaatacagtcacattagggattacagcttcaacataagaatttgggggaaacacaactcagtccataacagcatccttgtgagagcaccatagtgatttcatagactctccgccgaatatatagttccataaaaggtcagttggatatgtaagtccattggatctcagttgtatgaaggagtaaagatgagggactggtgtataagctgaaaggtcatggattggagccccaaataaggtcaggaaccaatgtgcccatggtgcttgagcaaagtgagtcagaaggtagaagaaaaggctgtgtcagagaagggaatgtgcacaggagagaatgtgaagattgtgcagtgtctgtgaacagcattcacagtgcaggtgaggtcagtgttgctgagaagttggagtcttagccagaggctcagccctgtggagcaccctgagagtgctgacaggtattggtgtggagaggatgtgaggctggtaggtgatcaaatattcagggcagtgtgtgaaaccaggagacctgtggatggtcctaaaaaaagtatggtaggtaatggtgtggaagccacattacaaaacaaggacattcatcccactgtgtaatgcttgagatatgaaaggaagaagctgtctatctacttgagggaatcttacaaaaatcttcctctcaaggaacaagagaggtgtctagccaaggacatggaaggaatgttggacagagaaggagaggatgtaggggcattatctgacctgtgtgttcattctagaattggcaggtggaggctgggaaaatgctatacaccctgacctttgtacatttacacaaatatgtgttttctcaacctgaaaagtatagaattatcaaaacatttatattaataacaagcagcttacctatcattgtcttaaagcgaaacctatcttttttgtctcgtttttaatccttgttttaatttaaagaaaaacagcagctcttacaatgatgttgagcacattaaaaagaatgctgtacaatccaaggagcaagtcattgtggttgcccaggaagctgtcttggaaacccaaaatatatgtgtaacgggaggaagactgttctaggtataaaatacatcttaacggtttcattattctatatttgggacttggatttaagacaggcaatatcagaatcctcaaaataggctagttacaagaaaagtatttaattttctcggctgtttcattaatcagaatgctaattcaataaatgtaacggaatcatttgcaacaacatggatgaacctggaggatgttatgttaagtgaaatgagccagtcacagaaagacaaataccacacaatcttacttatatgtgcagtctaaaaaggttggactcatagagaaagagaatacaatggtggttactaggggatgggggtggttggggaagatgttggtcaaaggattttcacatagaaagaataagttcaagagatctattgtataacatgatgactacagttaataacaatatattgtattcttgaaaatcactaagagtagattttgggtgttctcatcacaaaaaatgataggtatgtgaggtgatgcaatatgttaattagctcaatttagccatgtcacaatgtatatatatttcaaaatgtacacaatgaatatatacattttttgtcaatttaaaaattaattagttttttaaaagtaacaggagttaccataattatgaagaattatatgccctcctgaagtgactaatccttgttatttatattgactaagaagcctggtaagaggtaacacagaagcctaagaatgagaactaaagccaggtgctgtggcttgcacctgtattcctagctactcaggaggctgagaccaaggcaggaggatcacttgaggccaggagttcaagaccagcctgggcaacatagcgagactctgtctctaaaaaaatttttataattagccagggtgaggtgttgtgtgcctgtagtcccagctacttaggaagctgaggagggaggattgctcgagcccaggaatttgggctacgtgatctatgattgtaccactgcacttcagcctgggccacagagtgagatcctatctgtaagaaatttaaaaaataaagaatgagaaattggatatctggtgaggtaaaaatagagcttttatttctaagttgagtatacaaaagacaaaaattagttatttttcatatggaggacagaaatacaccaagttataattcttttttagttaccagtattattgtcaagtttaagcttttttctgtttattggcaagctaaataattgtacatgtttttaagcatatatagtgttgatggacggtatttaaagttttaagtttcagtctcaaataattaacataaggctgatctcattagtttaggcaaaaatacaagtaaaattattgcatgagaacactttgtatagttttgtttttgaattttttaacaaaaatatttattcttataatgatttcctaacagagatcttagaaattgaaaaacaacttaatcagtcttaagttaaaaactgcctgaaaaatatgccatttctggtatttactttgagtaaagtaattgtagattcacgtaatttctggcactgtctgtaaattataagatactagttggacacatatatctacatgtgcctaatcttacatatttatgaaggcaatattagcctatctgatttttaaaatcagtataggttgactctcccttatccaaaatgcttaggaccataagtgtttcagattttgggtttgtttggttggttggttggttggtttgcattttggaatattaccataaacataatgagatatcttgggtataggaccctagtctaaacaggaatttcatttatgttttgtgtacaccttgtacacttggcctgaaggtaattatatttttcctttgaggatgctgaataaactgaattttatgtgcctgtgttttgactatgacctgtcacatgagatcagctgtggaattttctacttgtggctgcatgttggtgcttaaagattttcagattttggaactttgcagattagggatgctgaacctatatattagtcttggaagtttagattagttaaactttctttgagaaagcctacatatcagaaccaagttttatatcactagaatattatgctaatgttatgtttacactgataaaataagggaaaagacattgcatttgtcttatttgcaggctttatcttactttgaaatattgattccaccctttagttacataccagctagtaaggttgtttacatattgtagtaaataagctctgagtgcctcacatttctttcttatcgtgcaacctaataagcaaggtgcctggcttaattcacagctaaacttttttcttcagagccagagcttcagctgcagcaagaaagatttccttcagaaactggcatatttgaatcattaggagttcaattttcaattttatttattttttatttttttgagacagaatcttgctctgttgcccaggcaggaatgcagtggcgcaatctcggctcactgcaacctccgccacgcaggttcaagcacctgcctcagcgtcctgggtagctgaaattataggtgcacaccaccacaaccagctaatttttatatttttagaagagacagggtttcaccatgttggccaggctggtctcaaattcctgacctcaagtgatccactcgactcagcctcccaaagtgctggtacaggcgtgagccgctacacctggcctgattttttttttttaatttagttattctcgagtttttaaattttaaatttgtgtcagtgcccattagtctctataaacctatcagtgcaggagcaccttagatttaaaatattttataaataaattcattaacctggtaatattttgtgttaaaatttcttctaagactaaatattcctagtgtatacacagaatgccaaatttggtgaccaactgaaaaaactgactaatggagaattaaagttttgtttttcttctgtcactccatacaaatgttaaaaccatgttgaattaagatttctctgaaggcgcttctataattctgaaatacatttagtgtaaataaaagcctgccactttacacataggcacagcagctagggctgtaataagcctacatatcagaagccttggttcttataagggtgggtgggaggtattacctgtgtcaaaattatagtcactgtgcttaactcaggacagacacaggagttccttttactgctgaaagacctacttacccatgactatgccctaatatgtatgaaggtaagccaaggagatatgagctgttgcttcccttctcctgtcgtattcaagagaaacaaaatagccaataaatcaaatctgacaactccacccaactcaagtttccataatgtcaaggaagttgctggccagaaatagaacacaaaatcagttatgagttgtggaacctcagacaacctagattaaaccaaataaacttagtgagaactcagtgaaagcaggtaggatttactgctgaaaaagggtcttgagggaccacccggcacctgtcctgaatacaagggctggaagagcaggctttctctgcaggagctcctcagcactggcgtggggagaggcaggcatcaggttagattgttggttcctctgtctgtcatcaaagcctgaggtaaaggccaccagagctactgaaaggagaaaagttgagcttatttactggccaggcagtgaaacacagaagggaagacattcacttgggcagtttgctgagtaggaagagtcaggaatttttaagtggtaagaaaaggtggttctgctcattgtaattaggattgaaaagtagcatttcgcgtagcatggaataattctggaatgtggatgtgtacacttttaataagcttgatttttcattggtcaagaaaagagcattcgggtagatccatcgagatctctacctcgttactcatattgcctggtcattgattgccttcagctgactagacccagttgtgataaaacaatatactcaatgttgacatctcctacacaagaggcactataagtagaaatttcttcttttacactgatttttggggaaaattttatttacactaattatggaaataggttgggggtaccaggagggagcatcctttaaagtcattggggacctgggctctgtgttgtccactgctgaaagcctactgcctcctagaaattctggcatagagtaatctaacaaatctttgttgagtggggagacagcagctcgggtgtgtcacatactgtttcactaccctctcatgctcctccctacaccagggcttctctgttcactctaaataactgctttctcaatccatccccttgtcctcatagggaaataaggaaggacatttccacatgagtcctagggttagacatctttccatcaaagaagaaagtacttgtggacatgatttatctcagtgtgcatggttgtgagttagaaggtaattaattgtattgaaggtgagggggaactgttccatactggccctatttacacacccaaaaatgccagggatgcttgtgtagtcttatatgtagagcaggtcttaacaagtgggttttctagattgtaatgctagacgtaataagtagcagtaggctggagagtaggccatgtaaaggaagtcccggttggatggcacttaaggcctaagtgttttgaagcctaggggatctgactaagctgattgctcaggctgcccactgaggactcagttgtgactcacacttttctctctgcagcagatccagagccagagctctacctcgatcctttctgccctccgggtttctccagtcagaaattccccatgcagcatgtgctgtgtaatcatcccccctggatcttcacatgcttgtgtgcagaaggtaacatccagcctggggatccgggcccaggggaccaggagaagcagcaacaagcctctgaggggagaccctggagtgatcaagcagaaggtcctgagggagaaggtgccatgcctttgtttggaagaaccaagaaaaggactctgggagcgttctccaggccaccccagaggcagccagtcagctctcggaacggcctcagaggggtggagttagaagccagcccagctcagtcagggaaccctgaggaaacagacaaattgttgaagaggatagaagtcttaggatttggaacagtcaactgtggagagtgtggactgagcttcagcaagatgacaaacctgctcagtcaccagcggatacactcaggggagaagccctacgtgtgtggggtatgtgagaagggcttcagcctaaagaagagcctcgccagacaccagaaggcacactcgggggagaagccaattgtgtgcagggagtgtggacgaggctttaaccggaagtcaacgctaatcatacacgaacggacacactccggtgagaaaccttacatgtgcagtgagtgtgggcgaggcttcagccagaagtcaaacctcatcatacaccagaggacacactcaggggaaaagccttacgtgtgccgggaatgtggcaaaggcttcagccagaagtcagctgtcgtgagacaccagaggacacacttggaggagaagaccatcgtgtgcagtgactgtggcctgggcttcagcgacaggtcaaacctcatctcccaccagaggacgcactctggggagaagccctacgcctgcaaggagtgtgggcgatgcttcaggcagaggaccacccttgtcaaccaccagaggacacactcaaaggagaagccctatgtgtgcggggtgtgtgggcacagcttcagccagaattcaaccctcatctctcacaggcggacacacactggggagaagccgtatgtttgtggggtgtgtgggcgaggctttagtctcaagtcacacctcaacagacaccagaacatacactcaggagagaagcccattgtgtgcaaggactgtggccggggcttcagccagcaatccaacctcatcagacaccagaggacgcactcaggcgagaagcccatggtgtgtggggagtgcgggcgaggcttcagccagaagtcaaaccttgttgcacaccagaggacgcactcaggggagaggccgtatgtgtgccgagagtgcgggcgaggctttagccaccaggccggtctcatcaggcacaagcggaagcactcgagggagaagccctacatgtgcaggcagtgtggactgggctttggcaataagtcagctctaattacacacaagcgggctcactcggaagagaagccttgtgtgtgcagagagtgtggccaaggctttctccaaaagtcacacctcaccttacatcaaatgacacatacgggggagaagccatatgtgtgcaagacgtgtgggcggggcttcagcctcaagtctcacctcagcagacacaggaagaccacgtctgtccaccacagactgccagtgcagcccgaccctgagccgtgtgcagggcaaccttcggattccttatactctctctgaaggcaaagatggggacaaggactaagagtcagaatgttgacactttgatgaaatggagtagagaaatgcattctgtaagtggtcaaaggacatttgactgtttactttctccacactaagtcttctccatgttttgtggccttcggttgtaataaacttggcttctttatacatctgtaactgtgcctgtgtccctcattcactcatctataacagggataaggaatgatacagacatctgaaacccttaagtccactattccacaggaattcatttcctcggaaaacaagaaccaaatcatttgcagatttattagaaagactggacctttgtatggggagagaatctaggaactacataaagagatttcatgggatgggaggggatcttccagaaagtgtagcttcctctagtccggctccatctgcagctacccccatcccttggctctgacagcccctttcctgcttctctcctcccagctttcaaacatctccgttgttgcctttgcccctgactacctttgttgtgtttctcaggcttttttagtccctggtccttccatcgggggccctctcaccaatacattgtccccagcactccagtcccacggcctggtcttgcagctgtgaccaagcagagccttggatctcagttacacccatatcagaccaccaagaaaatagataatctccaaccacccccagctataccacctcatcagcacctccataactacagtcaggcactgcataatgttcgtctgcgacggactgcatatacagtggtgggctggtaagattatagtggagctgaaaaattcccgttacctagtgactttgtagacctcccagtgggacaagatacagaggtggataagacagtgatatggatcctgaccctgtatagacctaggctaatgtgtgtgcttgtgtcttcgtttttaacaacaacaacaacaaaaatttaaaatttttaaaatagaaaaagcgtataggataaggataaaacaaaaaatattttcgtacagctgtacagtgtgtttttgttttaagctaagttacaagtgagtcaaaaagtaaaaaaatttaaagcgtataaagttaaaagctacagtaagctaaggctaatttattattgaagaaagaaaaatttaaaaataaattgagtgtagcctaagggtacagtatgtatgtctgtagtagtgtatagtaatgtcccaggccttcacactcactcaccactcaccgcctcgcccagagcaacttccagttctgtaacttgccatgtatggtaagtgtcctatacaggtgtaccattttttttttggcttttatgttgtattttaccttattttttctatgtttagatgcatagactcacccagagcagcttccagttctgcaacttaccatttatggtaagtgccctctacaggtgtaccattttttttgtcttttatgctgtattttaccttactttttccatgtttagatgcacaaataacttagcattgtgttacagttgcccacagtactcagtgcctacagtactcggtgtaacctgctacacaggtttgtagcctaggagcaataggctataccatatagcccaggtgtatagtaggctgtgccatctaggtttggtaagtacactctatagtgtttgcaaaatgactaaattacctaatgatttctcagaacatatccttgttaagcaacacttgactgtatatgacaatctttaaccatgtgtcttcctcagccctccaataacagagattaaacccttgaagccacattccccaatcagtcctgtaataccagtgtttaggactttgaatcatgctcctctatcccaggacccagtccccatgtcagtcatcaggtaactgatctaaggtctttaagccacacagtctcaatagttatcctatctcagggcttaaggtatttaaccctacataaatattattaaccatacctccttcagtgtctggttttgctcaaaataagtgtccttcaaggtaaagatcatctcaagggtgcaactgtaagacccctttttaagacttcagaaatatttaagtgtgtggctccttgactatacacaaaatggttctaaattttaagggaatcatcccatagcaccttgacactcaacccaaatgagaggcttgtcctgaagagctttgtggatatgggttttgtctaatggaatgagcttcaataagaggcatacccttaacgtttgtaacaggaacaccagcttgctctgaaaaggacagaaaagcccctacctctttctatgggcagggaggcagggtgagaaacctactaagctgcaagcacaggccatttctcatggaaaaggaggaataacttggactgcagacatcatggagaatcactctcaggggcagtacggtgctactaaggtaactggtggcatgtgcccagctgaactgctgaatttctatgaaccagtacctgctatttccccattttttgatagaagcactttttcagggatagttatccctgaatctacactgggtgttagatatgctgctttggttcccaggtcttcagataaagcatcatctacaccttgacctgatttagagaatgagatcccgatctttgagccaatgccatagtgggataagactttggaggcatcttaggagggatgagtatatatttcacatggaatggatgtgtgaaaatcgtctccaagatggacgtaatcaattcgtccctccctatatctttattatgagatggggtgaaggggagtgacctgttaccttccccatgtatctgggctggtcttagtgacttgcttcatcaagagggtatagcagaaatgatattatgggacttctgagactagttcataagaagccatgcagcttctacactttgaaccctgctgccatgctgtgaaaacttctagtcacatggagaggcctcatagaggtactctggtaatcagccatagctgagctagccaacagtgagcctcaactgcagtcacatgggagagctattttggaggcctgccctgtcaggcctttcagacgactgaaaccctaggtgacatctgcaaccaagtgagggacctcaagtgagaaccattcagctgagttcagtcaacctatagaactgaggcatgatgatagtagttgttttaagcctcaaattttaggattgtctgttatacaggaatagatcattggaacatataaccttggactgacttcctaactgattcaaactcgaagtcataatgaaaaaggtcagatttgtctatacaaaaataaattctgcaaggcaattcacacttacggacaaaacaaaagacaaacttgatagagatgctgtctttcctatctgcataataccattagaaatgaagttttaaaaatcaaaaacacagtcgaagatactaaaaaatacaaggacagatcacagcataggaagagaagtcttctttcatttgaaaatatccttgacatcagtaaaggtacaaatgaaagccacacacagagatatttgcacctgccagattagcaaagactacaaaatttggacatagtattgtagatggtggaaacaggcacacttctacattagtcttgggaatacaaattgccacaagtcttctggtggacaacttggtaatatctctcaaaatttaaattcatattccctttgagcccaaaatctaatttaatgaatttatctaatagctgtgtatgtttatgtgcaaaatgatttagataagttattcaatgcagtcatgagtaatttcaaattttagcaaagaaaaacatgttcagtagaactgattaaatataaatcatgcacaaacggacaatatgctgtcgtaacaaagaatgagaagcatcactatgtacttatatgaaagaatcaccaagattaatcagtgggaggagggatgggacaaacagtctgagaacactgtgtccagggtgctaagttttaggttaaaaagaggcaatcaaagaacatatttttaaaagaacaaagttggagaacttatacttccgaatttcaaaacttactatatagctccagtagtcaaataaccagtggagtttttttaaaaatataagcccaacagcagaattttcttctaaaatggcccacaaagacaatttgcattcaaatttgcataagtagggttttctagatgtaataccatactatatttttcttccaaaatggtcttgaaagcaggattatttttcatccaacttcactaagtcttatgagtttttagaaataattcttatgccaggcttttctaaaatgacccagaaatgtaacttttcatctaaatttgttcaagtttttaggacatgtggtcataaattctatgctacattattttacaaagttccccagaaataaatacacttttcattcaaattcattcaaatcatgggttttagggtacacaaattctttgtcaaatttctccccaaatgagtaagaaacctgagttttaaaaatccaaatttatataaatagtgggtttttgggaagtaagtcatatgctggatatttctcctcatatccccctggaaatgtgaaattttcatgcaaatctgctcaaatttggatgcttattggaacttaagtcctacaccagattttccttctaacatatgcagaaaatgtcatttcttatccaaattcactgaaatcttaggatctttggatctaaatcatgtgtaagacttttcttctaaatggcctggaaatgtgatttttcaatcaaattggctcaaataatgaagttttttggaaataatttctatgccagaattttcttccaaagtaacctaaaaatgtgatattttatcaaaatttccttaaattatgttttttggggtaagctgtattccagattgttctttgtaaatggctgggaaatattattttttcttaaaatttactaacattgtgaggtttattagacataagtcctgtcccagactttctttcaaaatggccccaaacatgtttttttcaaaaaatccaaatttactccagttttttggcacatcagccctaggccagctttttcttccaaaaagtggaaggtttttggatataagtccgatgcaaaaaatgtttttccaaaatgattcagaaagatgatttttttcattcagacttgccagaaatgtaattatggacataattgcatgccatatttttcttctaaaatggtgtaaaaaatatttaatccaaatctgctaagtcttaggtgggggcaggcagtagacatgaagtcctcaccataatcttttcccagtgtgacacagacatgcagcttatttatccatattcattaaaattgtggagtttttttaggtttttttttttaacataagatttaaagcagtttttctcccctagaatggcccagaaacatgatctttcattcaaattggctcagactataggttagtttggaaataaatccatgccagattattctaaaatggcctggaaatatggttttttttttcacccaaatcatagatttctgctgtttccgttgtagttcacgtgttttcaagtcctggcatagtgaattactgtttagatcaggatactgtgtcactagtgaattactggggaagaagtatacacacaaatccataccatatgtcgacaaaaagagttgaactcttacataattgaagagatttattctgagccgagtgaccgtggcctgtgacacagccctcaggaggtcctgagaacatgtgccccaggtggtcagggcacggcttggttgtatacattttagagaagcatgagacatcaatcaaatacatttaggaaatacattggtttggtccagaaaggcgggacaactcaaaaacgggatagggtggggtgtgcttccaggctataggtgaatttaaacatcttctggttgacaattggttgagtttgcctaaagacccgggattgatagaaaaggaatgttcgggttaagataaaagattgtggagaccaaagttctctggaagtcttatggtggctgcccttagggacaatagatgacaaatgtttcctattcagatcttagttaatctctttacgattgggggggggtctggaagaaaaatatatagctatgttaatagagattcgttacagatgcacgtttttccccacaaagaatagctttgcagggccatttcaaatatgacaaagaaatatattttggggtaaaatattttgattttcttccttgtctcataatgttatgccagagtcaggttggaaaataagtcacgatatacagggttaaataaaacccaactgatgagaatttatgatttgtagggcatgactccccagaccccttagataggaatttgggcaagataaaaaaaatcagagtttagttctcacatataccccaaatataagtagttctcagtatctgaaaatggctttattaagggagttaatatttctaaatatgtgtgagactgaacaccttctattccaatgagtgtcttgatatggtttggggctagagtttcttttgtgaaaggaaaataaattcactatgccaaaaggaaaaaaatgcagctgaaagctgggtcacgcaaacaactgtcttgaactgtagttgaattggggttttatcttggaaattctccttaatgactaaaagttaagattaacaatcagctggttttaatttcttcttaccattagagcactcagtaattgtatgaattgtgtgaccatttttttgttttgcttacctggttgtgtttgcctgtttctgtttttgttgtttcagtctttttcccattaggtttgatcatctctacccgacttggtcaaatctgaagaaaagttccaaattatggggaacaaagcctctgaattgtctacattcctgcagctggaaaaaaaaaataaaaaagccagcaaaaggaagaaaagaaagattttgactacctgaggggctttgtttacataacaaggccatctttcgccagccaagcccaaactgaaagaactatggtggctgccccgcagcgtagttcagtagctaaaggttctgcctgctttcaccatagcagcctgggtttggttcctgaatcaggtcctttctggcttaaattttgtgttattagtacttttgaaatatcagcaggttgtcccagctaaaacatggttaaaagagatttaaaaggatttttaagagctcagtggttaaaactcagcttaattaaaagctaatatccaagatgtgtgtgtatgaatataaggcctttatgctttttctctgtcctaggatcttgttttttgagaaaaagttttttgcttctcagttgactgagttctgtttcctcaaattactttggcctgtctctccttcctcttgccactctctgctgcatgaaggatctaaataatttctaacagcctgggattccttaaagaaaagagagaaggcaccagactcctttctggggagaaatctctgttcttccatatggaaccccaagaatataaacagacaggttccctctgatcttaaactgcttgcttttgtattgttacctgatttttaaaaattatattatagcaagcaaacatttttctttaaaaaatgttcttattaaagggaaataatttctaattcaaaggttatttatgaaacaaggcaaaagataataaaggttaaaaggaaaataattttatatgagaaagaatttgtatggtaaattttttgtcccaaaataaaatgactggttatttaagaaagcggatatttaagataaaacaggaagtccaagtgtggcaggccaggtctcactaatgcgggccttcataacaactgtttcagcactgactgattaagttaaatattaaaagctgaaagggccagtgaccttatgcaaaggctgggctgtaacagaagcccaccaagagttttgcctaagcctttcctggccttgaaacatgacaagataatgaaggaattcttaacaggatacatttaggattaagcaagttttattgggggtctgaagaaactccccaggcctccacaaacaagtttactggggtctgaaggaacttcccaatcctccatgatttagcaggagacaagataagggtaatcaccccggaacctggacccatttagattaagtaaatttactcaggctccagaggaaggtcttcagaactcagatcttagttacagattaaaagaagttaatcacttatgtctttagatgaatgcatacttacacatagacatatggcttagaagacatataagctctggaaaactttgtaattttgagttggtctagcagtgttttccaggtcttctccctgtaaccggttacagaaataaaaactctcttcctccccagttcatctgcatcttgttatcgggccacgagaaatagcagcccgaccctcagtttggtctgggaacataggcatatatcataaatggtttgtgtaagtcataataaactttgtaaaaggagaatttatataaaaaaactttatgtgatcaagttggctatagttaaaagaaaattatttctaaaagtctctgtagagattaggctttgatattaaaataccctaatactcaaaagaattggttagaacaacaaaattttcttaaggtattgatttactcttaatgaaattacaggagatttttgttaaccccaaaatttaacttttattgtgtcttgctgttttcagttttctctcccctttgagaaggcctgagataataattcactccaactttttcatcagctcctctaactttttatccttattttctaaatgctgttgtgacctaatgctaaaaatgttttatcttaaaggtttaaaggaaatgttttcttccaatataacattctgtgctcttagcttttcttaatatgtctaaattggtttacaaaattgaaaacctggctgggtgccgtggctcatgcctgtaatcccagcactttgggaggccgaggtggacggatcacctgaggccagggattctagaccagcctggccaacatagcaaaaccccatctctagttaaaatacaaaaaattagccaggcatagtggtgtgcgcctataatcccagctacttgggaggctgaggcaggagaatcacttgaaccccggaggcggaggcagcagtgagcccagattgcacctctgcactccagcctgagcaacagaatgagcctccatctcaaaaaaagaaaaagaaaaccttcacttaggacacactcttcctatgtctaactaattcaagtacccatttttcattagttttgacttgcaggttatctaaatggactccccacagggaacagcagtcacactgcaaaaagatttatttttggggtttttgccatttggtaactggactaacaaacagattttatgttttattgaaataattcctacatcattattaagttttgatttgcttaggaaaactgagattaattttgtttttaattaaggctattacctacatgtaactttctgtattacttttaaaatccttgtgctattgagttacagggttttgactcctggatgcaaaaaggaccaagttctgctgaatcttaaacactgacagcagttaaaggctcaccttcagacttaggagatgataacaataaaaataaactgcattcatgaaacacagagccagaaattaaaactattcaacccctctaggcccagggactattgaagaaaaggtgagtgtgtgagactgtaagggccaattttgagagagaaaattatatcagagtttctctatagattaaacattaataatcaaagaaacaccgatgcaagaccagcatctgggcccctgtgtcagattgacaaggtttttcttggagcattaacctactctttaaaaaattagaaaaagttataaaaaggtttagggaagttaaatcttatggtcaagatgattaaaatttaatagatttgtttataagacttcaggcagatttaattggcctcatgctttctttattagtacttattgtttgggaaattaagtctcctctctcaaagaaaaaggcttttgcctttaaaaaaaatatttcagttatcactttggctgaatgaatgacttattttacaatttcctgtgatcccatttatgatatcaagtgttttaaactttttttatatttgacaaactttccaaaatcaagttctaaattcagtcctttgaccttttaattttttgatattaggtcccctgaagtccaaaagagacatattttgcttatttggcataataaaaccatacaagaagcatcatcaaatatgaaatggtgtttaacgttctttggattatatttatataaatgtgttattagtatgtattccaaaattatatgagattcctgtgattctgatacatcttagtacatgttatcagtagtaattatgattattatgtcaaattgttgtatgccgcaggagtaaccaaatttccttgtaaattgtgtctttaaccatgaccgttctaagactttcattatccacaattgtggttttactttggtctgtttatagagtggtttataatcagctatagacctctgaggagtactcttaaatatgagtttctgatagtattagagactgtgcgattggaataaagagaaaaacttccagaactctcatggaaagttgatgtattcatgagggttgttgatcgactattgagaagaacaggagttaattgcatggactgaactaatagaagattgaaataattacaataatcctttatggctttttatttaaaaatttgccagttctctttgttttatttttcagatttaagaaaattttctcttcttttaagctatgtacagcttttaacaattgagtaaattatactctagtgagcaaaatttaaaacataatttctttctctctacctcatttccccaaaatttggaaattatttgtaagtattcttaatttatggcaatatagttatttatataagctcaataagaatctgttttcttttataacaggatgtaattggagatactggttagtttaccaacgctttgactggaatgacatatattcagactgccctgagaaaataaggctaacttttagagccactaaaaaccccttggaaagattggccttataccttgttatttacagggtcctggcctgtggtaagtaaagaatgtcactttcagacatacctaggaaccccaaggttttttggagacctcaaaaagagaggaatttattccatttacacaggtatctgcaggcacagataaatccttgactggcctcatggctttagaaaagccctaatctcagattccttatggaaaagcttccagcaaagccaaatttttcaaaaagacagcctatatggcaaatgattattgttgctgcacttcatgtaaataatcaagccaataataagactaaaacttactttacaaataaagtggtcctactatgattttgtctttaataaaatgggagaattggagagagaaaaatcatgtttcaaaataaactctagtacacctgttattggattctaactttgtcaagtgtttttcaacttttattatattctacaatttggactgaattctaaaatatttcgtgactacaagtttccaaaataatgttttcatttttttcttctctcctttcctttttctgccatttttcctgattttaaatactgaagctagacaacataaacttatgtatctctatatataaacaaattttatacctacctactgatgtattgacttcggagtaatatggcctatatcagttttccaggattgttctccctttttaaaaaatatttgttattttctcatctttcctctgcttcctttctctgtccttcacctattttttctttgtagaatataagacttcataactggctaaaaatgagttttcctaacaacgtgggaccttacccctctaggaatgggccatcccaatcgtgagagatcagacaaatcctgagatcagagactcattttcttctaaaatgcattttctgaaagagtttaaaagaaaaaatagggaggtttggtccaatggtagtgggttatcagaacttattaacactagtgtcactaaagttggtatatgacccccccactgctaaatttgactggctttttaaaaagtggcggtgagaattgtgaaaagaaaataaatttactatgccaaaggaaaaatattaagctgaaagctgagtcatgcaagcaactacctttccttttgttcctaagtagataactacagataaaaggttaaatatttccacaggtagctactttatgttcatcttatcttatgtaacgtgtcaatttactgagtgtgacaccaatacataattgactattcccttgcttgctccttttctcttgcaatatgtggattaccatactctccctctttcctctctatcccacttttctcctttaaatgttgaagccctgaaagtcatctttggagaaaggcacagacttgtttcccaagcacatcattcaccttggcaaaataagcttctaaattcattgagagctttatcagatactttttcgttcatacttgctctttctaggacctggtattgtttcttatattcttaaattgctttgacagtattgaacacctagtttatgcaaggacttatatactaaaaattacctaagagtgtctctggttctgagctttttatttttttatgacttttttttttttttggatggaattttgctcttgttgcccaggctggagtgcagtggcgcgatctcagctaactgcaacctccccctcccaggttcaagcatttcttctgcctcagcctcccgagtagctgagattacaggcgccaccacacccagctaatttttgtatttttagtagagacggggtttcaccatgttgtccaggctggtctcgaactcctaacctcacgtgatccacccaccttggcctccaaagtgctgggattacaggcgtgagccactgcacccagtcaacattttttttaaaggaaatgattcacttctaatacctgtaaacaagttaaacttagtcatccaggagtaatgttactgaaaatagcagagtagggaactctaaaatcctgtctctccacaaaagcaatgaacaatctggcaaaaactgtcagagtcaaattttttggaactctgggaatctattaaaaaacaacaatagcaagcaggggaatgcttactgaagaaagacactgctgaattttggtaaaagtgctgtggctttgtaacttacctgcttaccatgccccatcatcagcttggtagcagctaagacagcagctcacattccagatgcaggttgctggcatcagagggagaaatatggacttattttcaaggaatcatggtggtgtgttttgatctgtctgggctccctgaagggttggcacaagggcttgcttttcttttacctgactcaaactttctccaaggcataagcagtttccagatggtgtttgttgaaagcatgtaaaagcaaatgtattagccttagccacctgagacaaaggatgacagttggagcaagcaacaagcaacaagaaaagtctgggaagaaagagagcacacatggagatacatggagaaatgatgactttgaaaagcttctgtatatatgaagaaatccagaaggtcacatacatgcccaggctggacatatgcccagagacacctgaaaagactctaatctttaacatctatctaacttttaggctccacacaaggagggagtgaaggttaaggcagagttttaaacaacctggccaagcattgaaggagttcctcatgcaaagccaacctgcaaagactgggagagtattttatacttttggctctcactatttcaggaaatctcttcaaatcactagctgaccactaagctaaaataacaaaacttcagtggccaatgacaaggaatatagctttaacaaaaatggtttagagaagtgtctaaaccattaaagtgttaaacaacaacaaactacaacaagcagcaacaacaaactctggagaagaaggagaatctgatttccaaagttgtcatattattcaaaatatccactttgccacaaaatgttatgacacatgcaaagaagcaagaaattacggcccatttgcaggaaaataagaaatgtatagaaacagtccctgaagaagcccagacactggacttaccagacaaagactttaaatcaactgtcttaacatatgttcaaagagttaaaagggaaccatggacaaagaactaaaggaaaccagaagaatgatgtgtcaccatatagagaatatcaataaagctatacaaaatataagaaacaacctaatagaaattctgaagctgaaaagtacaattactgcaatgaaaagttaattagagtggttcaacaacagaacaaagaataagcaaacttgaaggaaggttaattgagattatctattgtatgaagcaaaaagaagaataaagaagaattagcaaagataaataattcctggagtttcaatgtacaacagggtaatgacagttaaacaatattgtatagtgataatttgttaagaggataaattttaaatctaattacacacatgtacaatggtaactatgtagaggtactggatatgtttattagtttggttgtgatcatttcacaacgtacacatatcaagacatcaaattgtacactttaaatatatataatttttatatgtcaatgatgtctcaataaagctatttaaaaaaaatgaaccaatcctcagagaactatgggacagcatcaagcataccaacatacatataatgggagtcccagaaggagaagaaagaaagggccagaacatatatttgaggaaataatggttaaaaactctcccaatttgatgaaagacatgaatctacacattcaaaacgctaagtgaactatataggctggtgcaaaagtaattgcagttttgccattactttcaataacaaaaaccacaattacttttccaccaaccttacacaagtaaggtaaatgcaaagagattcacactgagatacgttgtattcaaattgtcaaaagtcacaaagagaatcttgaaagcaagaagagaagaggctcatcacttacaagagattcttaataagattagcagctggtttttcttcagatactgtggatgccaaaaagacagtaggataaatatttaaggtgctgaaagagaccaaaaaaaaaaaaaacctagctgggtgtcgtggctcatgcctgtaatcccaacaagtactttgggaggctgatgtgggcagatcacttcagcccaggcaacatggcaagacctaatctctacaaaaaatagaaaaattagccagacatggtggctacatatgtaaatataaagtattattgtatttttggcttgtaactcctgtttttttctatatgatttaaaagacaaatgtgtaaataatcattataaacaatgttaattggcacacaatgtatgaagatgtaatttgtggcagtaacaatgtaaggaggggacaaagctgtataggagcagaatttttatatactattgaaagtaagttggtataaatttaaactagagtgctacaaatttaagatgacaattgtaattcccagagtaacaatgaagaaaataactaaaaagataatgagaaaaagaaaagagaagaaatcaaattgatacaatttttttttttttgagacagagtctcactcttgcccaggctggagtgcagtagccacaatctcagctcactgcaaactccacctcccaggttcaagtgattctcctgcttcagcctcccaagaagctgggattataggcatgtgccaccatgcttggataatttttatacaaaatgatacacttaaaaacatcaattaaacacaaaagggagagacggagggtggagccaagatggccgaataggaacagctccagtctacagctcccagcatgagcgacgcagaagacggatgatttctgcatttccctttgaggtactgggctcatctcactagggagtgcccgacagtgggtgcaggacagtgggtgcagcgcgctgtgtgccagccgaagcagggtgaggcactgcctcactcaggaagcgcaaggggtcagggagttccctttcctagtcaaagaaaggggtgacagacagcacctggaaaatcgggtcattcccaccctaaaactgtgcttttccaatgggctttaaaaatggcgcaccaggagattatatcccacacctggctcggagggtcctacgtccacggagtctctctgattgctagcacagcagtctgagatcaaactgcaaggtggcagcgaggctgggggagaggcgtctgccattgcccaggcttgattaggcaaacaaagcagccgggaagctcaaactgggtggagcccaccacagctcaaggaggcctgcctgcctctgtaggttccacctctgggggtagggcacagacaaacaaaaagacagcagtaacctctgcagacttaaatgtccctgtctgacagctttgaagagagtagtggttctcccaacatgcagctggagatctgagaactggcagactgcctcctcaagcaggtccttgacccccgagcagcataactgggaggcacctcccagtaggggcagactgacacctcacatggccggttactcctctgagacaaaacttccagaggaacaatcaggcagcagcatttgcagttcaccaagatccgctgttctacagccaccgctgttccacagccaccgctgctgatatccaggcaaacagggtctggagtggacctctagcaaactccaacagacctgcagctgagggtccttcctgtctgttagaaggaaaactaacaaacagaaaggacatccacaccaaaaacccttctgtacgtcaccatcatcaaagaccaaaagtagataaagccacaaagatgggggaaaaacagagcagaaaaactggaaactctaaaaagcagagcacctctcctcctccaaaggaacgcagctcctcaccagcaatggaacaaagctggacagagaatgactttgacgagctgagagaagaaggcttcagatgatcaaactactccgagctacaggaggaaattcaaaccaatggcaaagaagttaaaaactttgaaaaaaaattagatgaatggataactagaataaccaacgcagagaagtccttaaaggagctgatggagctgaaaaccaaggcttgagaaatacgtgaagaatgcagaagcctcaggagctgaggcgatcaactggaagaaagggtatcagtgatggaagacaaaatgaatgaaatgaagtgagaagggaagattagagaaaaaagaataaaaagaaatgaaaaaagccttgaagaaatatgggactatgtgaaaagaccaaatctaagtctgattggtgtacctgaaagtgatggggagaatggaaccaagttggaaaacactctgcaggatattatccaggagaacttccccaatctagcaaggcaggccaacattcacattcaggaaatacagagaatgccacaaagatactcctcaagaagagcaactccaagacacataattgtcagattcatcaacgttgaaatgaaggaaaaaatgttaagggcagccagagagaaaggttgggttacccacaaagggaagcccatcagactaacagcagatctctcggcagaaactctacaagccagaagagagtgggggccaatattcaacattcttaaagaaaagaattttcaacccagaatttcatatccagccaaactaagcttcataagtgaaggagaaataaaatactttacagacaagcaaatgctgagagattttgtcaccaccaggcctgtcctaaaagagctcctgaaggaagcactaaacatggaaaggaacaactggtaccagccactgcaaaaacatgccaaaatgtaaagaccatcaagtctaggaagaaaactgcatcaactaacgagcaaaataaccagctaacatcataatgacaggatcaaatacacacataacaatataaactttaaatgtaaatgggctaaatactcgaattaaaagacacagactggcaaatcggataaagagtcaagacccatcagtgtgctatattcaggaaacccatctcacgtgcagagacacacataggctcaaaataaagggatggaggaagatctaccaagcaaatggaaaacaaaaaaaggcagaggttgcaatactagtctctgataaaacagactttaaactaacaaagatcaaaagagacaaagaaggccattacataatggtaaagggatcaattcaacaagaagagctaactatcctaaatatatatgcacccgatacaggagcacccagattcataaagcaagtccttagtgacctacaaagagacttaggctcccacacaataataatgggagactttaacaccccactgtcaacattagagagatcaacgagacagaaagttaacaaggatacccaggaattgaactcagctctgcagcaagcggacctaatagacatctacagaactctccaccccaaatcaacagaatatacatttttttcagcaccacaccacagctattccaaaattgaccacatagttggaagtaaagcactcctcagcaaatgtaaaagaacagaaattacaacaaactgtctctccaaccacagtgcaattaaactagaactcaggactaagaaactcactcaaaaccactcaactacatggaaactgaacaacctgctcctgaatgactactgggtacataatgaaatgaaggcagaaataaagatgtcctttgaaaccaatgagaacaaagacacaacataccagaatctctgggacacattcaaagcagcgtgtagaggcaaatttatagcactaaatgcccacaagagaaagcaggaaagatccaaaatcgacaccctaacgtcaaaattaaaagaactagaaaagcaagaggaaacacattcaaaagctagcagaaggcaagaaatacctaaaatcagagcagaactgaaggaaatagagacacaaaaaacccttcaaaaaattaatgaatccaggagctggttttttgaaaagatcaacaaaatcgatagaccgctagcaagactaataaagaagaaaagagagaagaatcaaatagatgcaataaaaaatgatgaaggggatatcaccaccaatcccacagaaatacaaactaccatcagagaatactacaaacacctctacgcaaataaactagaaaatctagaagaaatggataaattcctcgacacatacactctcccaagactaaaccaggaagaagttgaatctctgaatagaccaataacaggagctgaaattgtgggaataatcaatagcttaccaaccaaaaaaaatccaggaccagatggattcacagccgaattctacgagaggtacaaggaggagctggtaccattccttctgaaactattccaatcaatagaaaaagagggaatcctccctaactcattttatgaggccagcatcatcctgataccaaagcctggcagagacacaaccaaaaaagagaattttagaccaatagccttgatgaacattgatgcaaaaatcctcaataaaatacgggcaaactgaatccagcagcacatcaaaaagcttatccaccatgatcaagtgggcttcatccctgggatgcaaggctggttcaacatactcaaatcaataaatgtaatccagcatataaacagaaccaaagacaaaaaccacatgattatctcaatagatgcagaacaggcctttgacaaaattcaacaacccttcatgctaaaaactctcaataaattagggattgatgggacatatctcaaaataataagagctatctatgacagacccacagccaatatcatactgaatgggcaaaaactggaagcattccctttgaaaactggcacaagacagggatgccctctctcaccactcctattcaacacagtgttggaagtgctggccagggcaattaggcaggagaaggaaataaagggtatacaattaggaaaagaggaagtcaaattgtccctgtttgcagaagacatgattgtatatctagaaaaccccatcgtcttagcccaaaatttccttaagctgataagcaacttcagcaaagtctcaggatacaaaatcaatgtacaaaaatcacaagcattcttatacaccaataacagacaaacaaagagccaaatcatgagtgaactcccattcacaattgcttcaaagagaataaaatacctaggtatccaacttacaagggatgtgaaggtcctcttcaaggagaactacaaaccactgctcaatgaagtaaaagaggatacaaacaaatggaagaacattccatgctcatgggtaggaagaatcaatatcgtgaaaatggccatactgcccaaggtaatttatagattcaacaccatccccatcaagctaccaatgactttcttcacagaattggaaaaaactactttaaagttcatatggaaccaaaaaagagcccacatcgccaagtcaatcctaagccaaaagaacaaagctggaggcatcacgctacctgacttcaaactatactacaaggctacagtaaccaaaacagcatggtactggtaccgaaacagagatatagatcaatggaacagaacagagccctcagaagtaatgccatgtatctacaaccatctgatctttgacaaacctgagaaaaacaagcaatggggaaaggattccctatttaataaatggttctgggaaaactggctggccatatgtagaaagctgaaactggatcccttccttacaccctatacaaaaattaattcaagatggattaaagacttacatgttagaccaaaaaccataaaaaccctagaagaaaacctaggcaataccattcaggacagaggcatgggcaacgacttcatgtctaaaacaccaaaagcaatggcaacaaaagccaaaattgacaaatgggatctaattaaactaaagagcttctgcacagcaaaagaaactaccatcagagtaaacaggcaacctacagaatgggagaaaatttttgcaacctactcacctgacaaagggctaatatccagaatctacaatgaactcaaacaaatttacaagaaaaaaacaaaaaaaccccatcaaaaagtgggcaaaggatgtgaacagacacttctcaaaagaagacatttatgcagccaaaaaacacatgaaaaaatgctcatcatcactggccatcagagaaatgcaaatcaaaaccacaatgagacaccatctcacaccagttagaatggcgatcattaaaaagtcaggaaaccacaggtgctggagaggatgtggagaaataggaacacttttacactgttggtgggactgtaaactagttcaaccattgtggaagtcagtgtggcgattcctcagggatctagaactagaaataccagttgacccagccatcccattactgggtatatacccaaaggattataaatcatgctgctataaagacacatgcacacgtatgtttattgcggcactattcacaatagcaaagacttggaaccaacccaaatgtccaacaacgacagactggattaagaaaatgtggcacatatacaccatggaatactatgcagccatagaaatgaagagttcatgtcctttgtagggacatggatgaaactggaaaccatcattctcagcaaactatcgcaaggacaaaaaaccaaacaccgcatgttctcactcataggtgggaattgaacagtgagatcacatggacacaggaaggggaacatcacactccggagactgttgtggggtggggggaggggggagggatagcattaggagatatacctaatgctaatgacgagttgatgggtgcaacacaccaacatggcacatgtatacatatgtaagaaacctgcacattgtgcacatgtaccctaaaacttaaagtataataataataaataaatacataaataaataaaaaacacaaaagaaggcagtattgcaggaattgaaaaatgaaaaatatataatccatatagaaaacaaatcccaaaatggcagaagtaaatgcttcctcatcagtaattattttaagtgtaaatgtattaaattatttaattaaaagggagaaatcactaaaatgaatttttaaaatatgaaccaactgtgtactatctacaagagactcactttagatccaaaggcataagaggtagacaatgaatagacaggaaacatatattacatggaaatagtaaccaagacagagctggagtgactgtcctaatatctgacaaagtagatttaagtcaaaaattgttacaagggacgaagaatgatattatacgtttatgttatgttatatgttatgaaaaagtcaatccatcaagaagttagaaaaattataaacatagatgtgtaacagtgtgagccccataatatatatgaaacaaaaattaacaaaattaaaaacagaaacaggccattttataataatagttgaagacttcagtaccccattttcactaatggattattgagctatagagcaactagatagaagattaataaggaaacagaggacttaagtatcactgtaaaccaactagacctaatagacatatgtagaacacttcacccaacaacagcagattacacatgcttctcaagagcacatgaaatattcttcaaatattcttaggctgcaaaattatcttcagtaggtataaaaaggctgaaataacacaaagcatcttgtccggccacaatgaaacgaaagcagaagtcaataacagaaggaaaactggaaatttcacgaatatgtggaaattaacacattcataagcaaccagtggataaaagaagaaaacagaagggaaatttaaaaatgctttgactggagtcactgctgctaaggtccctaccacagatgcaagaaaaaagctttatgctttctgtctgattatgacagctaagattgaatgcagcaatatagaaactacataaacatggagggggcagataatttttgcaactcagaaataaccttataaacagcaaataactggttttactcaaaaaagaaaaaggaatctcaaatttgagtttatgttagaagtggaaaattgtttccctcatgtccttgccttctggttgattctactttagaagcataaatatcaaaactattttagattaaaagcaaattaatgattttattttttttcttttggaaacagggtctcactctattgcccaggctggagtgcagtggcacaatctcagctcactgcaacatccacttcccaggttcaagccattctcattcatacatcagcctcacgagtagctggaattacaggcatgggccaccacatctggctaatttttgtagttttagtagagatggggtttcaccacgttagccaggcttgtcttaaactcctggtctcaagtgatctgcctgccttggcttcccaaaatgctgggattacaggcgtgagccaccacgcctggctacaaatgaatgattctttaataaaaataaaaataaacaataaatgctttgagatgaatgaaacaaaaacacaatataccaaaacttatgggatgcagcaaaaacaatgctcaaaaaatttatagctataaatgcctacaagaaaaagaaggagttcaaattaataatttaacctttgatcctgggaaactagaaaaggaaaaagcagactcaatttagagcaagatcagagtggaaattatagaaatatacaatagaaaacaatagaaaagtcaataaaaccaaaagttccttctttgcaaaaatcaacaaagttgacaaatcttcagctcaattgaccaagattaaaaagaaaggagatgaaaatcagaatttttttctttctttttttttgagacagagtgtcactctgtcacccaggctggagtgtagtggtgcaatcttggctcactgcaacctccttctcctgggttcaagcgattctcctgcctcagcctccgaagtagctgagattacaggcacccacgacacgcccagcttatttttgtatttttttttagtagaaatggggtttcaccatgttggccagggtggtctcgaactcctgacctgaggtgatccttctgcctcggcctcccatagtgctgggattacaggcatgagccactgtgctgggccagaaaatcagaaattaaagtggggccactactgcagaccttacagaaataaagattataagagcatattatgaataattgtatgtcaggaaattagataacatagatgacatgtacaaattgctagacacgtacaaactaacaaaacttaatcaggagtaaatagaaaatctgaacagagctataactagcaaggagattgagtcggtaatgaaaaatctcctaataaagaaaacctcaaaaccacatggcttcaatggtgaattctaccaaacatttaaagaaaaattaacagcaatcctccttaaactcttccaaaaggtagaaaaggagggaacaatacctaactcattctatgaggccagtaattaccctgagagcaaactttggcaaacatatcacaaggaaggaaaaatagaggccaatatcccttatggatatagatgaaaaaatcctcaataaaatactagtaaaccaaacccaggagtacattaaaaggattatacagcacagccaagtgagttcctgattcagcataagaaaattaatgtagtacaccacattattagaatgaagagaacaaactacattccatttatatgaaatattcagaatagaataatccacagagacaagattagtggttgccaggggccaggaggaaaggcgaaatagggagtgactgcttaatgggcatagggtcactttttggggtgcaaaaatgttctagatctggatagcaatgatggctgcagaacattgtgattgtcactgccatgtacactttaaagtatataagccactgacttgtatactttcaaatgataaattctatatgaattttacctcaattaaaaaaaatgtagccatctaaatcttataaacagggcgatcgaataacagaaccaaaacaaaacaatctagagctgtgcatttactttttttttggtgccacaaaagtatttgaggtctaaaattatcaatgtaaaataaaacttacacacatttggtaaatcctaaaatgttagcaatggcctttcaattgttttcaacagagaaaaagataatacacaagccaggcgcagtggctcactcctgtaatcccagcactctgggaagctgaggcaggaggatcccttgagacctagagttgaagactagcctgggtaacaaagagagaccccatcttttttttttttttagatggagtcttgctctgtcacgaagctggagtacagtggcatgatctcaactcactgcaacctccacctaccgggttcaagcaactctcctttctcagcctcccgagtagctgggactatgggcgcctgccaccacacccagctaatgtttgtatttttagtagagacagggtttcaccatgttggccaggttagtctcaaacaggtgatctacctgccttggcctcccaaagtacctgcattacaggtgtaagccaccacgcttggcagtgtctagatattttaacagtatgtggtaaagctccctgtatttaagttagtgtaaatatcaaggctctcctgccttctgtactcaagaaaatttataagtccacatttctgcttcagattttctaaaacaaatggtttctgccatattcactgagaaaactaataaattggaaatcagtatcagtaagaaaaaaatctatccatacacaaatttttaaatttattttttatttgtataaatgtatggggtacaagtataatttggttatagataaattgtatagagcagtcagtgtttttagtgtatccatcactggagtaatgtacattgtaccattaagtgctttctcattgtcctcagccaaccctcttctcaccaccccaccaacctaagtctccattgtctatcattccacactctacttccatgtgtacacattattcaacacccacttagaagtgagaacatgtggtatttgtctttctgtgtctgaattctttcacttaagaaaatagcctccaggccaggcgtggtggctcacgcctgtaatcccaacactttgggaggcccaggcgggcggatcacgaggtcagcagatcaagaccatcctggctaacatggtgaaaccccgtctctaccaaaaataccaaaaaaattagccaggcgtgttggcgggagcctctagtcccagctactccgggggctgagccaggagaatggcgtgaacccgggaggcggggcttgcagtgagccgagatcgcgcccctgcactccagcctgggcggcagagcgagactccgtctcaaaaaaaaaaaaaaagaaaagaaaagaaaatagcctccagtttcatctatgttgctgcaaaagacatgatttcattcttttttatggctgaagagtattcatatatatataccacatattcttatccaatcatgggttgatggaaacttaggttgattccatatctttgctattgtgaatagtgctgtaataaacatctatgtgcaggtatctttttgatttaattatttttcctttgagtagatacccagctggatcatatggtagctctatttttatttattttttcttttttgagagatggagtctcgctctgttgcctaggctggagtagagtggtgcgatctcggctcactgcagcctccacctcccgggttcaagctattctcctgcctctgtttcccaagtagctgggactacaggcctgcgccaccatgcccagctaatttttgtatttttttagtagagacgaggtttcactatacgttggccaggctggtctccaattcctgacctcaggtgatccgcctgcctcagcctcccaaagtgctgggattatgggcctgagccactgtgcctggcctgtttgccatcttttgaaaagtgtctatagatacccttagcccagtttttgatgagattatttttgctgttgttagtagtctgagttccttataaattctggatattcatcccctgttggatatatagtttggatattcatcccctgttgtatatataatttgcacatattttctcccattctgcaggttgtcattttattctgttgattttttttttttttttttttttttttttggtgtgcagaagctttttagtttaattaagttccatttgtctatttttgtttttgttgcctgcacacaaatttaataatttctcatgatctcttgggttaataatgtcacatctgaaattagatttcaaaattaaagatattggtaacactataaattgaaaatacttcttagccaagtgtcctcaaaaaataattcttagccttaaatgggaacaagaaaggctaaaattttaaaagtatgtgtgcaaatcaagaacctagaaaaaaatcagccaaataaacctaagaaaaaagacaaagtattacacaaattggtataataaaaatgtaggccttatcagtaatatccacaatattgctgaggcagacaatcatttgtagttcagattaagttaaaagtcattaatttcaggaaaaataaatattacactgcaaaagatttaaaaaacatatgttccatgtttacaaaattgtatatacatacacaaacacaaatacacaaatatttctagatttgaaaatctagataaaatagatgtttaggaaaatatagctgatcaaaatttaaacaaagcaagttaaaaaataaaaagaaaccaaaatcacaacaattgaaaagttagacaaaaaattatctcaaagacaccatatttgaggtgttattaaaatttttaccaaaattaatttgctctataatcccaatgtttaatcaatgggtccagaaatagatgaaaaggtggaaagttagcaaagcatttgtttagttaaaaacaacaagaacaactaaaacaactaaacaactaaatcctacttattagcataacgataaatatactaaaatagcagagaaacaaatcctgcaatgtaaaaagactgacacagccaattagggtttaccaagaagtttaaggacagttcaacattagaaaaacctatcactgtagtttcctaaaggaattgacttttaaaaagaaaataacattttaatagatagtgtaaaattatcccttacaaaataatgccacacctgagcagagaaattttagaaatactggaagagagaagatatttacctgattaatgaaatcaaccaaaatcctggaataaacattttgttggatagtgaaatgctagaataaatgagaaaattaaaaattcttcagaagatgtccactattatggtcccaactcagtccattagaacaaagaaataaggtttacaattatgttataatgaagttatataaagttataaataaaacaaaaccctcagcaattgcaaatgttatcttccaaaatatgcgatgaaagaaactgaaaacctaagtgaaagatgccaatctgaaaagggtgcatacattatgattccaactatacagcattctgggaaaggcaaaactgtagagacaataaatgatcagtggttgccagagactcaggaggaggaagggaaggatgaataggaggagcatatgggattttcaaggcagcaaaactcttctggatggtactgcaatggcaggtacgtgacattacgtgtttgtcaaaacccgtggatcgttccctggcgtgatggctcactcctgtaatcccagcattttgggaggccaaggggtggtattgattgagcctgggagtttgagaccagcatgggcaacccaactctataaaaaaatacaaaaattagccaggtgtggtggtgcatgcctggagtcccaactactcaggaggctgaggcgggaggaccccttgagcctggaaggctgaggctgcagtgagctgtaattgcatcccttcactccagcctgggtgacaaagtgagactgtctcaaaaacaaaacaaacaaaaaacagaactttacaacacaaagaaagaacactaatgtaaactatgaactttagttaataaggtttcaatagtggttcatcaattgtaacaaatgttccacattaatataaaatgttaataaaaggagaaactgtactgaaggaagaaggggttatgggaattccttttttgcccaaattttctgtaaattgaaaaactgctctaaaaatagtcatttttaaaaagagagttttggtaagaaaaccatataagaaagaaaacattcttacatatctgcaaatgccagtgacacaacatcattaaaaatacgtcatttagacatcaggaaacactttaagtagctagcaagtaacctatgaaaaaatatctaggatttacaagaagaaaattataaaactttactgagaatatttctaaaagcacatataatttaaaaaatgcaaacatgatttctataaaagattcaacactttaaagatgttaattcctcctttttcttacatgcatattgatctataaatgcaataacttttttccacttgagatttttagtggatttggatactaaagttcatttacaagataaaatttctgagaagagcaaataaaattttgttaaagaacaatgggagatccttttgtagttcgcgtgacgatggggtgttcacacgcatgtgtgagatgtgccacccttgaaccttgttatgatgtcgtcacattacccatccaacatgaacttgaaaaaaaaaagggacataaaaagaaaaaagaataggagacttcctttaaaagatttcagagttgtactgtaagccataataattaagatagactcctatacatatgggccttcagttaatgacaaatactgcatttcaaagagagcgaaaatgaaagacttttaaagtgttgttacaagctatatttatcctttgcaaaaggtaagttaggttgcccactttatagtactccctaacttaaattctggaagggtaggttcttagcagctactaaaggtagtaagtagatttctgctaaagggaagtctgagaggtcaatgagatatgcctctagaagtgtaccctggaaggacaagccctgaactttacaggaaggaggccaggacacacgatgccagaacccttgccccaagttactgtcaggaaccccgagtgaacccttgtcactgctactgaatcacagctgaaaaaactcctacctccttctccagaggaaaccttcacactgaggtgtttgtgctcttgcatccaaggagcctggaacacagaatacatgtacctcatggaagaacattctggaacactatgagtaaggcagtaaggagacacctgtgagctgctctggagactaagcaccatgaatatgattcctaagagacaatctcacttacgaatgatctatattaactcaagttaataactaatgttcaagttaataactaaaagttaatattctggactggcacccttgaagatttatttctacccaatattcctgagtttttaatttatatcattgtatataaatgatatacaataattataggcattttcaataaaacttttccgagaaaattaaatgaaattgccccagacagttctttctgtaaatgcagcatagcatgaagtttctttgctctttttttgaattcccccaaacatttaagactccagtttccatacaagtttgtgaactccatgtgttctgtaggacttgttgaaataaagatataataaatcatgtagagaaaatagctgaaaaaaagtaaaaataggagaacatgattaatattagtcttattagaataaaaattgtattcagtcctcaatcagaattgaggccgcctcttgccacttccctgctgcaggtttgtctcgaagggtaatggaaaccatgcagtgctatgctgctgacttgtacaagataatagtgacattacattcagctagagcgccaagtgacaagacagatggtgagagatcttaccagccatgttagttttctttttaactaataggcattgggaaaccacttaaagcttcaaatagacacattttagagaggtcactctggagctatggaaaaatggatttactggaataaagccagaggatgggaagttatttgaatggctattctaataatataattgtaggaaaatatgagaaccaaaatattctggaactaattattaattaaaatctgataacgaaggatgtcctggaagtgtcatgattatgacagctatttgttctgtttcttaaaatgttaagagattaagacacctacagctccaaaggaacacttgcttatgctaccttcacctgctgctcactggaatatcatctgctttctatgagattactattacagagctttctataagactgctattagataatgataattgctattatctaacagtatatgttggtgtctcctagtaaatttcctggcaagagacccaagcagtgagatgtcaacagcagtggatgcttctaggggatagaatgagccatctttgatgaatacaaattgcatgcttcaaagagtatggacactttttggatatgtgtgggtaagttctgaacactgaggttgaaaaaagaaaacaagtaccaatctatgaagagtattacatatcagaataagaaatttgaactttattctgtggataaagggtatttctaggataagatggcagaatttacacatcctctttctctacatctaataaaattaagcaaaattgaaaaaatatatatatttatcagtatcatttaaacatcttagttaaaatatgtacataatggtcacagagggacagaagattccaggaattttttggctcctacttccaaggccatttccaccctatgtgagcactatgaggaaaatattgtgaatggacaaaattcttaagtatgccatcaaacttggaaggaaataactgaagggacaatgaggcatcccagaggaatgatatggaatcactttcaatagtgatgtgtgatggttgtcacagcccacccacttacaccggcctcacagtcagccctcctacttggggaagagggtttttgggaaataggtctacaccagtgattctcaaccaggggcaatttcagcctttagtggacttttggcaaagtatggagacatttttgtcaaaacttcgggagggtaaggggtttctattgtcatggtagagacccaggatgctgctaaacgccctacaatgcacaatacaaggcccctcaagtgaagaatttgtgggcccaaaatgtcaatagagctgaggttgggataagccttgtctaaatgatggcagagaaaacaaatagcatttatttatactaatcaattaacaatctttttctttaaaaataaataaaagtccaccaaaaagttttccaggtcactgaatacatatgaaaacactggcaaaaataacaatgatgaataaagtgaataggtaacccttgaggaatcaggtaattgtttccctggtcttgagtgactgtgtccacaattcattttttctggtaggtataactccttttctgcatccatgcttcacagattctctccttttcagacatcctgggatgaaaggatttgacttctatttttttcattttaattttaatttattatttatttatttatttatttatttatttattttgagacggagtcttactctgttacccaggctggagtgcaatggcacgatctcggctcactgccacctctgcctcctgggttcaagcaattctcctgcctcagcctcccaaatagccaggattacaggtgcctgccaccacacccagctaatttttgtatttttagtagagcctgaccatgttggccaggctggtcttgaactcctcacctcaggtgatccacccccttggcctcccacagtgcttggattacagatgtgagccactgctcccggcccttttttttagactgtatttttcgacatctgttttctctcttcttaggctattaaatataagctatcaaataatgtggatagttaatgctcttatctctctcaaatccttctttctaataactgagagcaaagggactgtattgactgtgttgaatctcttcatgcaccagtaactcagctatgaagggggtcttctttaaacggctggtctgactttcatagattgacactgctcctttcttttattgtgaaaaaattaaactcctaaaaagtcttttgggaactctcaaagtcttttgggacttctcaaaaaacataagaagtattcacctacataaatgttgaaagattatatctttttttttttttttttgagacagagttttgctcttgttgcccaggctggagtacaatggcgtgatctcggctcactgcaacctccgccttataggttcaagcgattctcctgcctcagcctccttagtagctgggattacaggtgcccaccaccatgcccagctaattttttgtatttttagtacagacaaggtttcactacgttggccaggctggtcttgagctcctgacctcaggcgatccacccgcctcggcctcccaaagagctgggattacaggcgtgagccgctgcgcccggccagattatgtcttatgaataaaagtgataagaccatatggaattactggactagtagcatagttaagcattttgtttaagacaacaaagcgcattttgaaaatgctgctatctctcaatgctgatagtgcttttctcctgtgagtgacccaagaatattataaatagttagtaaagggaatggagactttgaggttgaacaaatgttgcactagctgtttctcgactgagtgtaacagcttcatgattaagggaaaacaaaattattttctattccaaagattcattctatgaggtggccataaagtctagaattagatactaatgttttgtcattcattgtaatgcaatattagtaaaccatttaaaagatttgcctggtttcctgacttggtggccaccttgaataattcttgctgtcttctgggaagaacaatggaatttattcctgccttaaaaatcatacatcatgactatcctcagagaatgtccttttctatttctaggagtgacttctaatcttccacactggtgagaaaaagaaagcctatttcatcccgttagcgatgctgaaacccatgatttactttctgaagatgtcccagcgagtcccccgtcaattcactgccacatatatcctgttccataacgagtgtgtcttccttataaatactgcccagactcttgccggttcctctccctttgtcctttcatgtgagtgttcttcggctaccttagtggaaatatagatctgtctcctccttatcctctcaattacaacaaaataagattgtttactttttacgtttacgggatgaaagtgccccgttcaggtcaatgaaacatcagtgcattgcattgactctgaacacttcagaatttagagctgccattgaatgccagctgatggagatagagtgcatatcagacaggtagataaagttcaggtttcctggggaaccaggtatagagaaaaacaagtctgatatgaggaaaatcgcacaatttagagtagtattgccatgtaagtgatttctgcaaactaggaaaagtagagctgaagttattatgtggataagtcaaaagaggaaagtgtgtactttttcagaagcagaaaaatattcaaacttctttcttctttttgggtttagcagacgctccaatgtgatctttgcctttggagtttgggtgaggtataagaaatgggctgatccctgattccatactttattccccctccatcctttccttccagatagacaattctacccatcagtgaatcactcaataagtctcaacagcatttgcttttgctgagattgctcagcagttgagggtcctttgctaggtgagaccaataggagacaaacaccttttccatggtcttttatttttttttttttagacagagtcttgctctgtcatccagactggagtgcagttgcacgatctcggctcactgcaagctccacctcccaggttcaagcaattctcctgcctcagcctcccaagtagttgggattacaggcgtgcaccaccacaccctgctaacttttgtatttttagtagagatggggttttgccatgttggccaagctggtcttgaactcctgacctcaggtgatccacctgcctaggcctcccaaagttctgggattacaggtgtgagccaccacgcctggcccttttccatggtctttgaaagatgatgcttatttcatggtcagtggcttaaaaaatccccgtcctggttttcttcaacaaactctctagttttccctttttacaaaaaagattttgtaaaaattagtaatcttaaaaatattctgacaaaaagtaaaattaaagggacatcttttcttggttttccttctacggccccatgtgcagtactttcacctttaagcaaagagagtggtttcgatagtctctaagatttcgacctgatctcacattctgccattctacccagctcttaattcagtttgcttccattatcctaacaggcttccacttatttagaacctggaaatgctgctatttaacaccctgcaacactgacgcaaacttatgataggtaccaattactgaaggccaaatgagtaaaatgtgtagttttaggacctttaaaaacatctcatttaatcttcctagcattctatgagagaggcatgattccacacttataaacaaagaaggaaaggttggggatgtgaagcatcttggccaggcttctgctgccagtgaacagtggagctgggactccagcccaggctttcccaactcagaagactgaacatccaggaggatgttaactacttgtgtcctgtcccaaacaacccggagttctcagtcggcttggttctgcttgtgacctcacatcaagaatagcagagatcaccaaagtgatgttcacctcagtgtgacactgttgttgttgttgtttccttggcttaagcaaaggaagcactagtggagagtctcagcccttaatcctcctccctaagtccccatttataatagaaataaaaggctgtaaagtcagctgggcttgggtccaggctcatctgtggaggaggcaagctcatgttcctcgccttccctttcaatgtccattgtgttgtgtctctgccacacaatgccattacccttgccattatctgtatacctaaatttgatcattttgtgtgtgtgtgtgtgtgtgtgtgtgtgtgtgtgtgttttgaaaaagatttagtaaaacatttcccaacaagtgaaagttcttggctgggcgtggtggctcacgcctgtaatcccagcactttgggaggctgaggcgggcagatcacctgaggtcgggagttcaagaccagcctgaccaacatggagaaatcccatctctactaaaaatacaaaatcagctgggcgtggtggtgcatgcctgtaatcccatctactcggggggctgagacaggagaatcgcttgaacccaggaggcagaggttgcggtgagccaagatcgtgccattgcactccagcctgggcaacaagagcaaaactgcatctcaaaaaaaaaaaaaaaaaaagtgaaagttcttatatggcatagatatgaattccttcctctggtaataattaggttattccaggaagcacaatgtcattctttaaataaaagatttcctgtttaaaacttttcaaaggagcagaccatgttggagattctccttaggtttggttggtgtataattcattttattaagccattcttcattttaaggctttgctataaagttaaaagtgtaccaaataaaaataaactattttgtatttagagaagagtaaagggaagaaaaatgaatactcagtctttatgtaaactccaaggatagtagggcttagagggcttttctagttttatgagaatttgtactactgatttttgtatattcctgtttttgagataaatggatctctggggaaattgttgagttacaatggcatttcactgtgatccctgtcaagctcagatcagctctataactcaatgatgacctgtctctttgattactgtcctgtaaaatgtcagctaaagtttcccagaggtcatgcatgtaccataaggcagagtacttttcctcagtgcaacagttgctggctctcttcatttcggtatatgtgctttaatgcaaagtatctaaacctgcagtgtgatctgtatatgttatcctattaattgtattattgatcattttgattatcttgcttgaagatttattcatactttttgatttggtagaaacaaattttttttctgcttataaaaaggatctaaaagacaggatgagaatgatgtcccaccaaatagaaaatatcaatgagataaaaactattaattggaaccccaaataaattatttggttaagaattacaataactgaaattaaacatgtactagaggtgttaattagtagatttgagcaggcagaagaactgatgggcatgaatacagattcagactacatagtatgagaaacaacaacaaaaagaatgaagaaaagtgaagagagcctaagaaacaccaccaggtggaccaacatgcattataggagtcctagagaaggagtaatagaggaatagaaggaaaagttgaaaaagtaatggccaaaaatttcccaaatttgatgaaatgcatgaatctatatattcaagaagctcaaaatactccaagtaggataaattcaaagagatcaacatgtagacacataataaactgtcaaaagataaaagactatgagagaatcttgaaatcagagagaaaagcaaatcatcatatacaagggatctgtaataagaaaaacaatggatttctcatcagaaacaatggaagtcagaaggcaatgagttgacatattcaaagtgctgaaagaaaagaaaatgtcaatcaagaattatgtatccaacaaaattatccttttaaaatgaaggagaaagtaagatatttccacataaacaaaaaataagtttattgctaatagactgactctacaagaaacaaaaagagaattaagtgatacattaggaaaagtctaacataaaaggcagtaattgagaaatagaggaacatggaaaattcagaaaacaaatattaaaatggcagacatagatcctaccttatcaataactagattaaatgtaaatagattactctccaattaaattttagagattggcagaatgtatagaaactatgatataactatcacagtatccaaaagaaagatagagtggctattccaatatcagaaaaaaaatggactaagttaaaaaaaaaaaggtcattagagacaaagaaggacattttgtaacaataaaacggccaattattcaggaagatatatcaattgtaaacatgtatgcacctaacaatagagtctcaaaatacatgaagcaaaaactgatagaattaaagggagaactaactcaacaataatcatcagagacttcaatattccacttttaatagtggataaaacaattagtagatcatcaaggaaataggaaactgaataacactataaaaccctaaagaatttcaagcagggtctcacatagatatttgtacacccatgttcatagcagcatcattcacaatagctaaaacatgaaagcaacccaagtgtccattgccagaaaaaattgacaagcaaaatgcagtatatacatataatgggatattattcagcttaaaagaagtaaattctgatatatgatacaatgtggattaaacttgaggacattatgctaagtgaaaaaagccaggtgaaaggagggaaagggtcagaaaaaaataactattgaataccaggcttagtacctgggtgacaaaataatctgtatgacaaaccctcatgacacgagtttacctatataacaaacctgcacatgtacccctgaacctaaaataaaagtaaaaacaaaaagaaattgaaattacccttttctatcaaagtctttgttctttatgtaaaatattatatttgggaggtatatatgtatcataattctatttttcaaataagaattaaacaacaataatatatacatatacacatatgtttatatatacatacatatattacatatgtatgtgagatgagggttatatttaaaaagttaatcaatcacaaaagacaaatactgtatgatttcacttatataaagtatttagagtagtcaaaattatagaaagtagaatggtggttgctggaggctgggagaatgggagttaatgtttgatgggtacatagtttcagttttacaagatgaaaaagttctagagattgatggtagtaatggttgcacaactttataaatgtatttaataccactaacatgtacacttaaaatggttaaggtggtagcttttatgttgtatgtattttactacaattttacaaattggaaaaaagaagaaatggaaaatatgaacagacctataacaagagattgattagtgatttttttaaaagtttagtatggatataagggcttcagaggcatagaggggaacaccaagacactctgggccacctcaaagcatgtggacaggacaacagtaaggaagttggcttcaccctaacggaaataaggtaaattcctttacccattccatagcaaggcatggggaaataataacctgcccacctgctccatatcgtccttcttagaacaaagcctgagaaataactcccaagtccccttagccaaagcagtgtcactgagaatggggtgatatagtttgaatgtttgtcctctccaaatcttacgctgaaatgtgattcccaatgttaaaggtggggcctggtgggaagtgtttgcatcatgggggtggatctctcatgaatggcttggtgctgtcctcatgagggtgagtgagttctcagagatctggttgtttaaattgtgtggcacctccccactctctcttactcctgctcttgccataggatataccagctccccatttgccttctgccatgagtaaaagtttcctgaggcctcaccagaggcagagcagatgcctttgccatgcttcctgcacagcttgcagaactgtgagccaattaaacctccttccttacaaatcacccagcctcaggtgtttctttttagcaacaaagaacagcctaacccaaggagtaagtgcctgtacttaacaatctcctgttcgctagccatcgacttactaataatactgattatgcacaaaggcccaccagccactgagcaaaatcagtcatattacatataacagacatattggtgagcacatcacatctggcagccacatacgcatatatttaattatgtccatgtggtttaagaaaattaaaaactttccaattgttacctttggtgagtggatgggggagattagtgagagttccaggcataaaactatgcaccatacacttttatatatttcattactgtggatctttatattgtgtgaaaatagaaatgaagataacaaataggataatttacatatcttttctgttaaatctagcaagtttatatccatatgaactgagagtgccagttcaaattcatactccctaaataaaccagaggtctctccatgaaacattgatatgaagtctttactgaaaaagagatatggacacattaaggcaattagtccctttattaaggtaaatagcaatgttcttttcttaaaaaagaaagatggagaggaaaagagggtgagggaggggtataggagaggaaaaggaggtgatggctgggggaggaagagggagggaaggttaggacatggagactggagaccagaggatgaacaggaggatgaaggtagtctagaggaaagaggttgggtaggagattgcgaagggaaatttagggcacatgggggcaaagcagagtctgaaatatttagtgaactccatggagatgtttattaggccctagccaaaacatgtcagtctgggtgtgtatcctaataaaaagcttgataaatttatgtatgttttaagaaatgtgttcaattctaggcttcctttgtctttagatgctcagggtatttcagagctgtccctgaagaaacacacagtctgcccagccatgggtaatgacagtcctgtgccacccccaagttaccatctctcactaccagcaaattccctgttcccaattcaccaagaaacagtcttcaacctaggaggaaagaaggaagaggaaagaagcatggggcacaggtggagggagagagcacatggtccctccttcctctccttgggatgctgctccgtggccccagcaccgctcccgagagatctgttctttcctgggacaaaacaaccatcagtttctggggttgagttctttcctggaaaggcagaagactgtctgttctttgtctaaggaaagcctgaaaacatctgtatgcttttgtctatcacttcaggactaaatgaagacggatgagcagagaaaggatggctcgtccatgtcttttatgtaaaggaaaccttcaggaagttgttatgaatgtttctgaggtgctggtgtgttggagagaaccaaaaaagtcttcaattttgtagttggccaaggaatagcaaaatcccggttctgaggcatttaaaaatagacaatggaaaaaagcaactggggtgagttcctgggactccctgcagtggtaaattggagaaagatgagacaaggatgcattccagcaagggagagacttacctttgtgtcaccatgagcccaactcctgacgctggggcccaggctgccagttagggacgtcaccattactggaccacagaggaagccctaccatccccaggagaagtcagtttcacactggagcatttgtgctcctagtaccctagttgcacggaactcagaatgcagggacttctaggtatattacgacttaaaacaggaggttctagaacacataagcacaggtgacccatgggagtagacatctgtggctgttctggaaaccaaccacagtgagcaccattttaagtaaaaatgttctaagttacagatgacttgaaggatcttactttgcagaagtccttgaacaatgttttctacctaatatcctcatgccatttttggcaactcactagaacagttttcagagaaaaagcctctccagtgatgatctaacttaacccaggcagcttggttttctgtcactgtagcataatgtcaaaattccttttctccatttattactcatcacataacaccctaaatcctcaagaaaactatttggaaatatcttaatatggcacatcactttcagcgtgtgctctataaatgtgttcttattttgaaaagtgaatggatgtctaaatcccaagaacaagcacagaaaggcagaacagggctagcagcttgtcttcccagaatgaatattgcgccaaccactgtgaaaacctggaactccaatagtcattccacacacaaaaaaaatctgatgcttagcatacatatttttggaacatctaataagttaatactttacattagtgggttttttttacatttatagtaaatctgacacataaagacctccatcctcagccaccccaactctgtttgaatggcacctggtggcttgtctgatgagctgcagccacactgccaccagcttgcccagcctcaggcttgtcctccagggcttggataggtaagtaaatgactccactgacatagtgactcccagcttctggaaaccaggaaataaatatgatttctaagagagctgagaaattaaggcttgaatttggcacagatctgctttcttttcctcttctcgctagcttgtgaccagctgttggatcggagttgggtaaactcacatcttgcacacaggcctccagcttgtgcttggtatttatggggagacacgtctccagctttgctgagtgtgagcccctacaggatcctggggcaaagggaagacaagaagcctgagtgaagcccaggcaggccttttgaggggcttgtctttcttgacaagtggagggaggccacagaaactttctaagccatcactgtcatggtcccctctgtgcaggccactccggcagctctgaaaggatggtgttgaggaatgcaaggacagggttggggagatctgtagggtggcgattttatcaaacctgcaagagatgatcttggtctaaggtggctgttgtaggaataaagaggaggaaaaggatccaggatccaggaacaattgaagagatgcaacccacagggctgggcactggatgtgaatgggaggaggagggagagctgggctgactgtcagggaggatccttgagcatgttgggtgagaccagctgagtcagagaagaggtgacagggcagggcctcaggactagagctcacctgctgacacagcatagcagaggacgctgaggggatgaactcaggcagccaggcaggaagtgtgctgggccccagagcctccctttgccattgcctctgagtgacctccctggaggaaaaagtcacacacttgcttatacaaggctgcaatgatttgagagcataataaataccaaaacagtaaaattccatggtgctacttgctctcttccctagagaaaggaaaagcatggaaaaataatgttggatgtgctatcacctaagcagatcagcaacatggcttaaaggtgagcaccactgggcataatgcacacttcaattaaatgcaaagttatcatgtgctcttctttcagaacttttaaatgtaaaatataagacacataagaagaaactcgagaaagaatttccagcttttgttagacctcacagagaggcctgtccattgtgcaaataatcttgcatttgggtgcctatttgcccaggtcttatattaaaaaagatatttactatggtctgaatgtttgtgatcgcagccccccaaattcatacgttgaagcctaatccctaatgtggtggtattaagaggtggggcccttgggaggtgattaagtcataacactccaccctcatggatgggattaatgccttcctaaaagagtcctaagggagcttatttgcctcttccatcaggtgaggacacaggtagaaggtgtcaactatgaggaatgggccttcaccagacaccaaatctgctatttccttgatctcggacttcctagcctccagaactgtgagcaataatgttatttgtaaattacacagtctaaagtattttgcagccaaaacagactaagaaagaatattgtaaggattcaaacaaagggagggatggtcaaagctacatgcaataccaaaagcctgaaaggacaaaggtacctgatcttagctataatgttaatctgggcatccttcccctagggatgatccaattcatgatccactaggcagaagacaaacactgattgacagatgtgtgcacttaattccttctctctctcaatgtcacggcaaatcctcatgcacagaggtcacattttattcctttacctccaaaggaatagacacacactaaatacctttagattgcatcatttccatttaatgctggtcctgatattaaggaatttaagaagagagtaggagaaggaggtgaaataagcttcctactttcacagcaggtaacatgtttcttggtacatggattaaaatcaggatttttgttaataataaaatagatttcctgtaaagtctttatgtaaaacagtctatgcacagacctttaataaattgataatgtatggacaatatttcagtaatttttcttgatttgaattttctgcactaatttcttacaataaacatgtaatgttttacacaaattatttcaataggagaaatagtaaatcatttagtcggtcaaaacttgatgaacctaaatgttttcatgactacaaatgtgtccaagaggcaacacatcctgcaatgttacccaccttacaacacaaaagcccacataaccaggatatgatttgaatttttaaatacttattttgcaattttaagttataaggagttgatacccaaatatttcctaatttaactggcttaagtatttttatttttatttttatctacaatcttacatcagaactatcagatttgtttttatgtgtttttcatgcttaacagccaagacatccctgctgcaaagcctgatttttggctagaaaatcttttgcccataccaaaaacacagtatattttctcaataattatttcctgataatctactttgtgccaggaactggaatttgacataagactccacaccaacatattttcagtcttctgggaagatggcatctgaccaggcaagaactacccggaccgatggtttctgctggagggagaactagaggtggtttggggcacacagaggggaagccctcatctggtcttcagggcagggtggtggagacaaacaggcagaggcagccatgttcacatgagtcagggtaaagagcacatccctggggaacttttttatacccaggtacagtcaccatggggagtgacggctgggacgtgggggaccacggagtcgccagccaagtcgggaagggcgtttggatttctcaggaagacatcgcgggccacccagagaagggcaggacacagggcacgaggacatgaggaaggaggctcatgcccaccaagcgcagggcccagctgagaccagtgagggcagatgggagcctgagcaggtacagggtcaggagttacgaagatagtggtcaggttcctagagctcaggcattcagctggggcgtggtggggaagtccactggggcagctggaggcacaagagagaagggctggatgtccctgaggccagcatctgaatgagagcagagctcgtggagagcacagcaaagttaaacgaaagcctaccaaggtaggagcgaaaggtattaggcaagagaagacaacataagaagtaaaagtgataagttcactgatttatacactaactcacactaaggataggaactgtgcagtgttgatccacgcctagaggtggaagttatctaaggcagcagtccccaactttttgggcaccaggaaccggtttcatgaaagacatttttccactgaccaggtgcaggggcttgtgggggggtggcttcgggatgattcaagtgcagtacatttattgtgtactttatttctattattactacattgcaatatataatgaaataattatacagcttaccttaatgtggaatcaatgggagccctgagcttgttttcctgcaagtagatggtcccatctgggggtgagaggagacagtggcagatatcagggattagattttaataaggagtgcacaacctagatccctcacatgcaccattcacaataggattcacacttctatgagaacctaatgccaccactgatctgacaggaggcggagctctggtggtaaagcaagcaatggggagcagctgtaaatacagatgaagcttcacttacttgcccactgctcacctcctgctgtgcagcctggctcttaacaggccacagaccactccatggcccaaggatcggggacccatgatctaacccaataactctcacatgctgcaaccctggccacaaggaaggtgacaggacttagggctaggggaataacttcagcagaggaagtggctcctcagctaggttgaaaacatgcagggatttctagcaggcctgaacctggaggtgcaggatgatgctgcagagagggagatgcttatctcatcatgcagggagtgaatgctagtgaccggttgaggcagtttgagcaggactttttacctggtggaaggcaaaggaatccagtgtcttcagacccctcaggcaggagggggtccaagggaacatacaccaaccacagccccctttccaccatggcctgcaagaggagaggtcacgtggacctcttgctcttggcagaaacttctctctacttccttgatcatgaaagttttgttgcaaagtcaacaagactaaagcatgtgcttgtgacttggttgttccacattctaaaacaagattctcaacttcttgacatggaatcaagtttattgacaaaacgcattacacagacctccttttgaagagccatggttcttcacggtttcctattgttgtataacatattaccacaaacttagctgcttaaaacaacccacacttattatctcataggttctgtgggtcaggagtctaggcatggcttagcagagtcctctgcttaaggtttgaccaggctgcaatcaaggtgctggctggggctgtgatcccatttgagctcgagattcttttccaggctcactggttgttggtggaattcagttcctggcagttatagaatggaggcctccaactcctagaggctgcatggcagttgctgcaacgtagtcctctacactcatggcagtttacttcttcaagatgaacagaagataatctcagcattttgagtctccaatccttagatgcccctttaaagggctcacctgattaggtcaggcccacccaagataatctcccttttgattaacttaaagtacattgattatggactcgctttatgccccaaatcccttctcttttgccatataacataacctactcacaggtatgacatctcatattcacaggcccctcatggaaaagaaggaatgggaggagggatatgtatgagtgtgactcattgagaggcatcttcgaattctgccaaccacatctgggctttaccactttgtatacccagtttgaaggaaaaataagagagggcacatatggttggaacagcaaagaaaaaacaagaaattaaagcagcttttcaaaagaggggtgtggtgcctggggtgaggtgccagaagggctaggatgaggaaaataggaaacctcatgtgaagcttcgtttctctgtgcatgtccatagagccttggccgatattctcagatctcatctaattcctactccactctctctgccatgtgtgaagtatgaaagtgctgggagagacacagacttatacattttactgttatgtgctttttatatttttatatttatctacataataactttccgtttcaggtagtggactatgaaaaagtaaaaaccacgttttctgaagcttattgataattaccatggaatgcaaaccctttattctctagataatctactaattgactccaatttattcattctatttatttactcactgtggtagccagcttccaaaatggctcccagtgatccttacttcctggcatgtgtgccctcacgtggttgcctctcagctgaatagatatgaccacaatgggatatggtggaaatgatggttgatgatttccaaggtaaagtgataaaacacaagaggcttctgtcttgctgtctctgggatggctcacttgaggggaagcaggccgccatgttgtgatgccactcaagccgcccatgcagaggtcaacactgggagggactgagccctcctgacagtaaccagcaccacgtgagcaagtcctcttggaaacatatcttctggccttggccaagctttcagatgaccaaagcccttgccaacatcttgactaaaacttatgaaagactccaaaccagaacaactcaattcagcagcttctgaatttctcatccacagaaactgagatactgattttttataatttaggcaactaaattttagagtaatttgttaggcagcaataaatgcttaaatatatactgaccttctattgtttgcccggcctgggtctggatagagaaagaacagagatagcaacttccctgctggtatagcgtctctgaagtggagtgcctttgggtgagctgtggaggctgtggtggaaatgtcagctggagcagtaagagaagagtctagatgttctgagtgtatagggctgctggggtaagagggtggcatcaaaccagctcccccccacccactaaatctaatacaattttatttttaaaaaagtccactctattcaaacgttagagcaggaggtgttcagaggcaaacagacatttttagaaattatgtgtctcatactccatgagactaacacgtcacctccctcatcaaagcagcctaggggaagaatgtgaaaggtcaaattctaaaaatctctaatacttccccaaatttgaagggaaaacaactgagggagggaatacacttactaaaacaaaatacatgaatgtccctctaatggtgactcctccctaacaactacataccggcaaagcaaaccaaagctggacagtagttaaagcggtaaaaacagattttcttcaggactgcaacagggaaagagagatcacactgtagaactggactcaattctgaacacagtgaggataagtgggaataagccaggagcagggtggaggtcagtggatgggaaattactaagaagacatcagaggaaaggggcctcctggttaaacagattcaacaggattcttgctgaaggcaggccaggataatcacatattacttgggggatgctggaggatgaggaatttgattggatattgagagtgatcaggtatgaggggtggggaatatctctctaaactgacttagcaagattctcactaaaactcagcaatgcaggcccaagaaggacgaaagccaaggttgaggcctagagggcttagatgagcctaactaaagtttagtcaaggagagtctttggcattactcagaaaaggaaagaataagtgcccagatttcatcagtttcttttttcatgctttgagaaaaagggaaagaacatttgaggatggaactagcaagaagaaataattaaaacaccacaacagctggcagtgggattgtggatcaagcttgagtgtggatcaagcttgatttatataaaatcaagttcaagaatgcctctccctgctggagatttaatcatgtttgggaaaggtttccccaaatcccaaatttcccctttttctcttctctgtttgatggggttgcagggaggaagtttctgctgaggagaggcaagatacaggggagaaagtggaggttgagggtggagaggaaaaaaattgttagtattgtttggatcagtagtaaaatttctgaggctctcactacattgggaaggaataatttaaaaactgagccatttatcaccacccattaaatcaggggcctgggaactgacactcataaaaattaaaataaataaatattgaattaatgtctgctaaacttttttttaatcaaggtaattaatgaatgaactaatacctctctacttctgaataatttccttggtttcaatttcatttagttctgctctgatctttgttattttgtttcttctgctagctttgggattgctttcttcttgctctttttagttccttgagatgtgacactaggttgttaattcgtgattttttttttttttagagacagggtcttgctatgttgcccaggctgatctgaaactcctgggctcaagcaatcctcctgccttggtctcccaaagtgctgggattacagagtgaactatttttttgaagtaggcatttaatgctataaattttcctcttagcactgcttttgctgtattccagaggttttactatgttgtgtctccattttcatttgtttcaaaacattttaaaatttccatcttaatttaattattaattcaaagatcatttagaaatgtgttgtttaattttcaggtatttgtgtagtttcacaagttcctcttggtattgatttccagttttattctgctatggtctgagaagatacttgatacaatttcaattttttaaactatactttaagttctgggatacatgtgcagaacatgcaggtttgctacataggcatacatgtgccgtggtggtttgctgcacccatcaacccatcatctacattaggtatttcttttttaaaaatgtattgagacttgtttgatgaactaacacatggtctgtcttggagcatgtaccatgtgccgatgagaagaatttatgttctgcagttgttaggtagaaggttctgtaaatgtttattaggtccatttaaagtccaacttaagtccagtgtttctttgttaattttctgttttgataatctgtctagtgttgtgagtggggtattgaaatcccctccccacagcttatgatttattgctgtctatctctttctttaggtctagtaatatttgttttatgattctgggtgctccagtgttagatgcatatatatttaggattgttatccacttgttgaagtgatccttttatcattatgtaagaccttgtctttttttattctgttttttatttaaagtccatttcatctgacacaagtatagctacttctgctcacctctgatttccatttgcttggaatattttttccatctctttaccttcagtttataagcatctttatcagtatggttaatttcttgtaagcagcatatagttggtgcaggcttttcttatctattttacccatctgtatcttttaagtggagcacttggcccatttatattcaacattaatattgatatgtgaggtttcattcctgacataatgttaattgttatctagtattttttgtgggtttttttttcttaatctgcttgtctttgtggtctagaaccaaaaacgagcctgaattcaaagcaaacctaagcaaaaagaacaaagctagaagcatcacattacctgagttatactacaaggctacactaaccaaagcagcatggtctggtataaaaataaatgtacagatgaatggaatagaataggagcccagaaataaagccacatatctaaagccagctgatctttgacaaagttgacaaaaacatacgctggggggaaagacacccttttcaataaatgtggctgggaaaactggattgtcacatgcagaagaatgaaactagactccctaatacccaccatatacaaaaataaattcaagcctatagtcccagctaatcaggagtctgaggcaggaggttgagatggcagtgagccatgatcctgccactgtactccagcttgagtgacagagcaagaccctgcctcaaaaattaaaaaaaaaaaactcaagatggattaaagacctaaatataaaagcagaaactgaaaaaattataagaattcctagggaaaacttttctggtcaaagcaaagaattcctgactaagacatcaaaagcacaggaaacaaaaacaaaaattgacaaatgaaacttaattaaactaagaagtttttgcatagcaaaagaaataatcaacagagtgaacaatctgcagaacaagagaaaatatttgcacactatacatccaataggagagtaatatccagaatttacaagaggttcaaacaactcaacaaaaacctctcaactctattaaaaagtgggcaaagattttgccacattttcttaatccagtctatcattgttggacatttgggttggttccaagtttttgctattgttttggaatactatgcagccataaaaaatgatgagttcatgtcctttgtagggacatggatgaagctggaaaccatcattctcagcaaactattgcaaggacaaaaaaccaaacaccgcatgttctcactcatagatgggaattgaacaatgagaacacatggacacaggaaggggaacatcacacactggggcctgttgtgggggggggggcggggggagggatagcattaggagatatacctaatgttaaatgatgagttaatgggtgcagcacaccaacatggcacatgtatacatatgtactaacctgcatgttgtgcacatgtaccctaaaacttaaagtataataaaaaaagtgtcaactatgacaatatcatacactaatttgactgccctaaaaatctcctgtaatccacatattcttccctttcttcttcccccgaacccctgttaatcactgatcttttaattgtccctatagttttgccttttccaaaatgtcctatagttgtaattatacagtatgtaaccatttcggataggcttctttgatttagcaatatatatttaaggttcccccatatcttaaaaaaaaaagcagtgttattgaggtagaattggcataaaataaagtacacgtgtcaaatattttttaaaaaagcgggcaaagactatgaataggcattttttcaaaagaagacatccaaatagccaaaaagtatatggacaaatgctcaagatcactaatcattaaattaaaaccataataagatatcaccttataccagttagaatggctatcagttaaagtcaaacaataaccaatgttggcaaggatgcagagaaaaagggacgcttagacattgttggtgggaacataaattagtacaacctctatggaaaatagtatggagatttctcaaataactaaaaatacagctatcacttgatcctgtgatcacaatactgggtatctacccaaaagaaaataaatcattgtatcaaaaagacaccagaactcatatgcttatcatagcactattcacaattgcaaagatatggaatcaatctaagtgttcttcaatggataactggataaggaaaatgtgagatacacacacacacacacacacagtggaatagtcttcagccataaaaaaagaatgaaatcacgttttcttcaacatggatggaacgggaggccattatcttaagtgaaacaactcagacacagaaactcaaatacctcatgttctcacttctaagtggacactaaataatgtgtacatgtggacatagagagtggaataatagacactggagacttagtagggtgggaggatgggagaggaatgagggatgagaacttacttagtgggtgtaatgtacatatctgggtgatggttacactaaaaatccagacttcattgctacgcgatataaccatgtaacaagactgcacctgtatcccttaaatttacacaaaaaaataaaaatttccttaagcgaggcccagaaagacaaatactgcgtgatttcacttatatgtagaatcttaaaaagttgaacttgcagggcatggtggcgcacacctgtaatcccagctacttgtgaggctggagacaggcgaatcgcttgaacccaggtcgcagaggttgcagtgaactgagattgcaccattgcattccagcctcggcaacaagagcaaaactccatctcaaaaaaaaaaaaaaaggttgaattcataggaggataaagtaaaatggtggttaccagggtgtgaggttgcagaggtggatgggaaaagggagactttggtccaagattacagagtttcaggtagataagatgaataggttctggtgattaattgcacagatggcaaccatagttaatagtcatgtattgtatatttcaaaattgctagaggagtggactttagatgttcctaccacaacaaaattataggtacttgaggccgggtgtgatggctcacacctgtaatcccagcactttgggaggcctaggtgggtggatcacctaacgttaggaattcaagaccagcctggccaacatgatgaaaccccgtccctactaaaaatacaaaaatcagcttgcagtttgctgagatggcgcaactgcactccagcctgggcaacagagcaagattctgtcacaataattttaaaaaaaaagtatttaccagaatttttgaataacattctactaaagtaactttagaaatatttataatacaatttaagagttagttaaaagatgcccgttatttctatttagtgatgtactagaagctgtagtgcttccaggattacagataagtgagaggcatgatattaaaatggacaagagtcaacatgtatgtattttttttcattttttcagacgatttatgaacaaagttaaagcagtgtcccagcctaaccagtagtctcacaaagtcaggtttatttgattcattgcaacaaggagtccattcacaggaaaaacaaaggaaaagatttagtaattctaggactctcaagaaggatgaaatttagtcaaaattgaaacacacaggtttttgataggctcagaataaagcagagctatgtgtaaaaggtcatcaccacatttggactggaaaatgggcccagggttttatgttcttggaaactacaaagttaaaagagatgtaaaaagttgtgtctgtaaacctctgtgctgaagctctgcaccagggttggaaattgaggctgcttctctgtgtcaaagtgacttcgatcccccaggcaagagtgggatgtttcattcatactgatttaatttcaaatagcaaagctcctggcagtctataatttttgagaacaaaattcctccatagtaagaaaccagtagtcactcaaagagagggttgttaacggcatttcacagctgtggcttgttcacagaagacaagtcatctgctctaaatttgcagctggctttatctgtgtctgttatcccagcttgacgaaagtccagactgatttttactttctcagcctgaattaatttttactttctcagtaattataaaacttcagaaaattgttagcaccaaaaaagagttttcagcaaggagccaggtgagaaaatagagtcaaaacttgatagtatttgagtttgacaaacctaacaaaaacaaacaatggggaaaggactccttagtcaataaatggtgcttaatgggctagccacatgcagaagattgaaactggatcccttccttacaccatatacaaaaatgaactcaagatggattacaaacttaaatgtaaaacccaaaactataaaaaccctggaagacaacctaggcaatatcattctggacatagaataggcaaagattttatgatgaagacaccaaaagcaattgcaacaaaagcaaaagttgacaaatgggatctagttaaactaaagcgcttctgcacagcaaaggaaactacaaacaaagtgaacagacaacctacagaatgggagtaaatttttgcaaactattcatatgacaaaagtctaaaatccagcatctataaagatcttaaataaatttacaagaagaaaaaacaattccatgtgggcaaaggacatgaaaagacacttttcatacatgtggccaacaatcatgtgaaaaaaagctcaacatcaatgatcattagagaaatgcaaatcaaaaccacagtgagataccatctaacaccaatcagaatggctacttttaaaaagtcaaaaagaaaaaacaaaaaaacctgctggcaagtttgtagaaaaaaggtgatgcttataccctgttggtgggagtgtaaattagttcaatcattgtggaagacagtgttacaattcctcaaagacctaaaaacagaactaccaggccaggcatggtggctcatgcctgtaatcccaggccaaggcgggtggatcacctgaggccaagagttcgaggccagcctggccaatgtggtgaaactccgtctctactaaaaatacaaaaattagtagggcatggtggcgcacacctgtaattccagctacttgggggctaaggcaggagaatcgcttgaacccaggtggcagaggatgcagtgagctgagatcgtgccactgcactccagtccaggcaagattccaaaacaaaaaaaaaccattcaacccagcaatcccattactgggcatatacccaaaggaatataaatcattctattataaagacacatgtatgcatatgttcattgcagcactattcacaacagcaaagacatggaatcaacctaaatgccaatcaatggtagactggataaagaaaatgtgctacatgtacacaatggaataccacaccgccataaaaaagaatgagatcatgtcctttgcagggacatggatggagctggaggccattatccttagcagactaatgcaggaacagaaaaccgaataccacatgttctcacttataagtgggagctaaatgatgagaacacatggacacatagatgggaacaacacccactggggcctattggagggtgaaggatgggaggagggagaggatcaggaaaaataactgttgaatactaggcttaatacctgggtgatgaaataatctgtacactaacctccatgacacaaatatacctatacaacaaacctgcacatataccctgaccttaaaataaaagttaaatttaaaaaaactaagttaaaaattaaaaaaaaagaaaacatcactaagggaaatactatttaaaacaacaaaaatattaagtgcctaaaagttaactgaacaaaaaaacacatagtgtttacaggaagaaaattaacatttttactgagaatataaaagaagtcaagaataaatagaaagattaccatggtttttgattaataaagtctcagttctccctcaaatatatgtctaaattccatgatattcccaattaaatctaaagaagaattttaagagttttaatagactaattcgagtttgtggagaggagaaaatctatgaatagtaaataatttttttttctcttttcaatttctttcttttttttttttttttttttttttttagtatttattgatcattcttgggtgtttctcgcggagggggatttggcagggtcataggacaatagtggagggaaggtcagcagataaacaagtgaacaagggtctctggttttcctaggcagaggaccctgcggccttccgcagtgtttgcgtccctgggtacttgagattagggagtggtgatgactcttaacgagcatgctgccttcagagcatctgtttaacaaagcacatcttgcaccgcccttaatccatttaaccctgagtggacacagcacatgtttcagagagcacggggttgggggtagggttgtagattaacagcatcccaaggcagaagaatttttcttagtacagaacaaaatggaatttcctatgtctacttctttctacatagacacagcaacaatctgatttctctatcttttccccacatttcccccttttctattcgacaaaaccgccatcgtcatcatggcccgtcctcaatgagctgttgggtacacctcccacacggggtggtggcccggcagaggggctcctcacttcccagaaggggcggccgggcagaggcgccccccacctcccggacggggcggctggcccggcgggggctgccccccacctccctcccggacggggcagctgccgggcagagacgctcctcacctcccagacggggtcgcggccgggcagaggtgctcctcacttcccagactgggcagccaggcagaggggctcctcacatcccagactatgggcggcaaggcagagacgctcctcacttcccagacggggtggcggccgggcagaggctgcaatctcggcactttgggaggtcaaggcaggcggctgggaggtggaggttgtagcgagccgagatcacgccactgcactccagcttgggcaacattgagcactgagtgaacgagactccgtctgcaatcccggcacctcgggaggccgaggctggcggatcactcgcggttaggagctggagaccagcccggccaacacagcgaaaccccgtctccaccaaaaaaatacgaaaaccagtcaggcgcagcggcgcgcgcctgcaatcccaggcacccgcaggctgaggcaggagaatcaggcagggaggttgcagtgagccgagatggcggcagtacagtccagcttccgctcggcatcagagggagaccgtggggagacgggagacgggagggggagggggagaggattttttgaagcaggacaataggagtgactactttaaagatatttatagagcattttgcaataatcaggccagacctttgtacacaagagaattcagggtatgctaaataaagatggcctttcaactagtgtggagaagatgagtgaccccaaaactgtattggcacaagggatggttgctcacttgggaaaaagtaaacttcagtccgtgtatcctttagaaatataaatggaaataaactaaaaagctaaataaagcagacaagtatttacatattagaagaaaatataagatgaaaatgttttgattttggaatagtgaagaacttcagcaagtcaaagacctcagaagtcctaaaaaatactaaaatatttgacaaaacaaatctataaagcatttattagacggtatacaatatacataaagaaaaggcaagaaggacaagacacctgtattatccagaatatgtaaggaatatgtaaagaaatctgacattatagcaatgagaaactatccaatagaaattatcccgtgagaaattatccaataaaaaatggcaaagcacatggatgagtgagtcatggaagtacctaccaacgcttaatccaggaagagatagtcttaataagaaatcaggaacaggcaaaaaataaataaataaataaactaactaatggcaatgatgtgtgtttgatctgcgaaattggggaggtgtggagaaaggcatactttggtgggactgtcaactcttatgagggaaattttggcaacatctttcaacactcaaaatatgcatagtcttaaatccagtgattttactttcttctgtcttcacaaaatattgacacatgactagaaatgttggttagctctgttaatctgtttaaataataatggtgtatgtctatgttttatattttttaaaaaaacacttaaaaagaatttagtcaattcacaaataatggaaaggtccccaagatgtataaatgaataaaaccaattacagaataattacattgtattcaaactttaagaaaactatatattttatatggtgttaaattgcagagaaagataaaggtttccaaagcctgcacatacgctgttttttattttagagacggggttttgacatgttgtccaggctggtctcaaactcctgggctcatgcaatccgcctgcctcagcctcccaaagtgctaggattacagacgtgagccaccgcgcccggccagcacatccactaacagtggttactgctggggattatgagagccacagaaataggacttccactttttgtataatattcaaaatgttattcttaattttcactataaaaattttattctagttttatgcgtaaagatttaaaaataactagtattttatttataattacaacgttctattaaagctaggggatttatatccttactaacagaaatacaacaagtaaaatttatgtagtctaggtaaacagaaaatgtcactatttcattaaaagagtagggttcattgaaagtgaaagggaaattttgagtcaattaatttaggtaaataataccatgcatttccatcacttcacaagagagaaggaaaggccaagagacgatgtggacaggaaagcaggggcctggcagaaggaaagggattgcatatagagggagtttttggggtcaggtaaggatttgggggaaatgggtagaaaaaccagttgagggagaggggatgaagaaggagatgggggaaggagagggaagaggtgagagatggaactgtgtttttgttggcaattcaagtaagaaccaagacatctcaggagcgttcccacggaatgtccaaatgctctgccttccagaagcaggtgctgatgtatttcgggaactctgtggacatacttagcagtctaaatctagattccgggttgaattcccagcactcagttcacccagatctggcctccagcagcaggaccagaagcagcagcgaggagaggcagaagcagcagccacctgggcactcctcaccatcacagaagcggctcccagatggctctgtgggcccaggcccctcttccttccattcagaaaaacacacagcagttaactgcatccgtgtgtgcaattgagaaggtaacacacttcatttcctgttcattgagggacaaaggtatatgtggccttttgtctctctttttgggatttacaatgaaaaggaggggagagtagagaatgagtcactttaccttgcctgttctatgtccccacaagaccgtacccttagaaaaccacaaagggaggctgggtttgcaattacttgaagaacgggaaggtggatgagaatccaagagatgctctttattttctgtttggccaggaaaaagcaaaaacctggctccgaagcagtcagaaatagaagtgggaaaagaagcaagtgatgtgcgttcttgaggtcctccgaagagatgtcttggagacaacagaaataaatgaccctgtaaattttctttatcctactgggcaccttgaccagagcacctggagctgtggccttgcacaggtgttggggaggaactcttctggattaaacatggaaaacccaccaaccacagagatgcaagcttcaagtgagcgtatctgcgctgctagtatcctagcggggtgggaatcagaatgcaatgacctcgatgtgtgttattacataggtagaaggttctagaactatgctgtagccaacccccatgtgcaggtagggggcatttaaaatgtggtgaattgaattaagatgtgctgtaaggataaaatgcacaccagatttcaatgacttggtgtgaaaaaataacataaaatatatagaatattgcattaacaatttagatgaattataaattgaaataatatttattctagtaaaatatttttaaaacttttattttcggttcagggtttgttatataggtaaactcatatcatgggggtttattgtacagattattttgttacccaggtactaagcctagtacccaatcgttattttttctgatcctctccctcctcccagcctccaccttctgagaggccccagtgggtgttttccccccacctgtttttttttttttttgagacagagtctcactctgtcgcccaggctggagtgcagtggggatctcagctcactgcaagctctgcctcccaggttcatgccattctcctgcctcagcctcccgagtagctgggactacaggtgcccgccaccacgcccagctaattttttgtatttttttagtagggacggggtttcaccatgttagccaggatggtctcgatctcctgacttcgtgatctgcccgcctcggcctcccaaagtgctgggattacaggcgtgagccaccgcgcctggccggtgttgtccctctttttgtgtccatttgttctcatcatttagctgccactttttttttttttttttttggacatggagtttcactctcgtcgcccaggctggagtgcaacggcaagatcttggctcactgcaacctctgcctcctgggttcaagcaattctgcctcagcctcccgagtagctgggactacaggcgcccactaccaggccgggctaatttttgtattttcagtagagatgaagtttcactatgttggccaggctagtctccaactcctgacctcaggtgatctgcctaccttggcctcccaaagtgctgggattacaggcgtgaaccaccgtgcctggccagctcccacgtataagtgagaacatgtgatatttggttttctgttcctgtgtttgtttgctaaggataatggcctctagctccatccgtgttcccacaacagacatgttcttgttctttcttatggctgcatagtctatttcatggtgtatatgtaccacattttctttatccaatctgtcattgatgggcatttaggttgtttccatgtcttttctattgtgaatagtgctgcaatgaacatacacatgcatgggtctttatggtagaatgatttatattcctttgggtgtatacccaataatgagattgctgggttgaatggtatttctatttttagctctttcaggaatcaccatactgttttccacaacggttaaacactcccaccaacagggtataagcatccccttttttccacaaccttgccagcatgttattttttgactttttaaaaatagccattctgattggtgttagatggtatctcattgtggttttgatttccatttctctaatgattagtgacaccgagctttttctttttttcatatgctttctggccacaagtatgtcttctttggaaaagtatctgtccatgtatcccagtaaaattaattttgcttgtttctctgcacttttagaagtatggctactagaaaatttatgattgtatatgtggctcagattgtatttctattggacagcactgtctggactctagaagatgctctgattcaagaggatgtaaagaaattctctaagccgataagaaaaatagaagaaacccaaatgggcaatgagtgcatgggaactcactcacctcagtggaaaggagggaatggcaagccagcccactgaagcccactggggacataggacaagtctgcaaagcagagacagcccctccaggaagagcgaccaggccttgagaggacatggccttaggaccagatccagggaagacacagtcactaacccctggctcatctggcaggtgtgggaagcagccaggcccgtggcttcaccagctccccccgatctctgccttcagctgtcctgcagcctgggtcaggcacctaggcagctttatggcaggcggagatgcaccacccacatcctctttccaggcagggcttgctgccctggctgtagcgagtgcggcagcaggtggcctccagctatcagcaacttcagagagctgccttgcctgaggtcccgtcccttctggggaagctcccatctgccagggggctacaaaagcacagtggacaccatgatgggcaattctggctgatgggagcaccacctggtggctgaggcattcttgggccacatagcagttgactgccctctccaccatcttttcacaagtgttaatcccaataaacacccatcctcttccatcccaaactgtcttggcatctgcttctagagagcccagcctggggcaaatttcacgggaaagggcgcatctcctgcaatttgcctgtgaccatgagggtggaggagggagatgtgtccccatgggttccagcttgtccttgctcgtccccttcatgctcacctgtacttcctgaacgtagccctgctgtggtacagcatcttcaggcccaccatcaaactaaccagctcaagcactgaagagagtctaactcctttaataaattccttgttccaggctgggcgtggtggctcactcctataaccccagcactttgggaggctgaggtgggaggatcacttgagcccagaagttcgagaccagcctacatagggagaccctgtctctacaaaaaaaaaaaaaaaaaaaaaaaaagtttttaataaaataaattagctgagggcagtggtttgtgcctgtaattcccagatactctagaggctgaggtgagtatcgcgtgagcccaggagtttgatgctgcagtgagccatgatcacaccattacattccagcctgggtgacagagagatagataccctgtctctaaaaaataaaaaagttttaaaaatctcattccctttcacttaaagtggctctgttccctcaacaagccctgtcattaggaaaagaaaaagaaagctttagaaaggacaaaaaacaacatgatttttcacatcagaaatgttctgccttaaaatgtgtttaattttcctgaaaatatgtactttaatattaatagaacattttatgtgaccctgtaggatttcatcagaaagcgttaaatattaggctgccttttcactttttagtcctattttaacggaggtttgattctgaaagagtgaaattcaagggtgatgaatgtaggctgtgagctttagagaaaggaaaggaccctagcatgagacatcagatgcgtgatttacagatccctgagtctggccagccggcactggaagggcctcttggtttcagaaggtagaatcctccaagagggagtgtggaaaacctaagaggcgttaaaagcgtggttcctgcactcagggcacaaaagttccccaccaagaaccccaaggcaattgtttctagaacccacgggtccatgaggccctccctgctccctgaggtctggggaaaatggccttgaaccccattaccccccactagacttctccctctgcacatcttttcacaagtgttgatcccaataaacatccatcctcttccatcccaaaggcagggtttgctgcttggcggtggcaagcacttccatcccttccttcacacaggatgtgagtggcagaggcacctggtgccctatagccaccatccaagcatgactgctgttgcttttcttctatcttctgaatctcatgcagtttttcttggggccaaccctgaagagaaccataagggaagagaattctgggcaaagtagtcccagccaagctgacacagggcaaaccaccacaggccccaaaccagatgatcacactccccagtctccctggacactggccaccatgcagcagcctcccttacacgagtggctgaggggctgataggggtaggagcagtggcggtgcctgcccaggggcctgtgttcccgcgactttgcaccctctgtcctcccacagacagctgcccagtctagggaagtatcaccacccagcaggtggtgataacagtaaccacctcaacaaggcccattacttattgtgctgaattaattatagcaaattaataaatattctattacttatgttaacacaaactagttagggacttcagaactgcagcattaccacccaaagattaaaataatgacgtgaagaaaggaatgagtcaaaattacacattcttataagtggtttattgagagctgatttgtcaatcaaagaacacaccataatgatgggaatattgatgatttcaacataaaaaaatttaaataaggtcaatctttacatagtaattaggagccacttacaagatgtatcaagcaaacagagcaagatacagaacagtgtgtggttggtttgctaccatttgttttaaaagaggggaaagaatatatatgtgctacagacatgtttatatgctatgtgtactcctctgtacatgtgcttataccacatgtatgtgcatatctaactctgcacaaccccgggaaaggcaagtcgacgctgatgtcattgctggctgaggagagaggtggtggctgtgggacagaatgggagggacgtatccctacataatacttcataccttttagctttgaaccatgtgcaattattacctattgaaaaataagttaaaaactaaaaatcaaatacacaaaaaacctgcagcaataaaccattaaaaaacatacattcagtttatcacagtccacagtatactgggagctgtccatttagtactgatggcttatactgtcatatgatttaaaaaaaaaatctcctgagttcctctcaacctcaatttctaatctcaaatacacatttcagaaagacatgattaaagaatagccagagctgcacatattcttttttttttttgagatggagttttgctcttgttgcccaggctggagtgcgatggcgcgatcttggctcactgtaacctctgcctcccgggttcaagcgattttcctgcctcagcctctcgagtaactgggattacaggcatgcaccactacgcccgactaattttgtatttttagtagagacggggtttctccatgttggtcaggctggtcttgaactcccaacctcaggtgatacgccagcctcagcctcccaaagtgctgggattacaggcgtaagccactgtgccagccatgcacgtattcttaaatgaagtcccgtggaggcctcagggctaacagtcatccaggctgaggctcctagtttgagcgagttggtcctcaagcccttggccaaacttggcagcaaagagtgaggtgacaaggtcatctccagtgttcagagccaggtcgtatgctgtctggcctcctgcattcttcttttggatgcttgcattgcatctgcaaaggaaatggagaaacggaggtgcactgaaggacttgaacatgtgaccctaagagcttgactctaccctgccatggaggccaggctgggcccctcctggtcccacctccccaaacctctccccaagaggtcacagtgacttcagttctcagaggtggctctaccctgaaacctttaaagaggctctgtgatttcaaaatgtccaattgcaaatcctggccattggttcccattgcattaaagtcctacaactgagtgtgtttaatgggggcaacattttcattgcgctttgaaaagccctcagtgccccggaagccatggtgggatggtggtccccatggacagggacagcagttcaggaaccaaggcccctcttaaaatcatcacaggccattagggagatccctgtggccctcaaaagtatccatcagaggccaggggacataccccagtaaagtggcggtgctctctcttcctgcaaggccaagcagagttgcttcatgaagagctgtatttctgagcctaatgaggggggaaaaatcctggataaatccttagttagcatcatcaggaaactggagaggatgcatgtgacccaaggtcctggttttgctcaccgacctacttaactaacctgggaaacctcttgagtctcctctctctgcctttctcttggaggaatactgtgatggagggtaagctttgatactagatagtgcaaaggttataaacacattcattttttaatgtgagaaacccacaaggatatggttggtagttgatttaataaatgctaataaataccattgttctaaattgcctgcaagagtttatgcaacatattggacatagtctttttttttttgagacggagtcttgctctgtcacccatggtggagtgcagtggtgtgatctcggctcactgcaacctccgactcccaggttcaagcgattctcctgcgtcagcctcccaagtagctgggattacaggcacatgccaccatgcctggctaatttttttgtatttttaatagagacggggtttcactgtgttagccaggatggtatcggtctcctaacctcgtgctccacctgccttggcctcccaaagtgctgggaggacacagtcttaactttggcttggacctcttgggcacgatagtagcttctcagggctgaagctcctatttttgtgtggggaaaatgaccttggctccagtgagttgggcttacatgatatgaaaataaacaccaatcttagaaaccagggggcaggcctgagaggtcagacacagcatattttgctgcaatgccagggtttctctccgtatttcctggtcaggtttgacctagtgagggaggagtgggcaactgaaatggaggctggagtggcgccaggactcctgaaaggctcctatgcagaggtggcaggagtgaaggagggcaggagtcatgactggaagtagaaatgaataggcattgacggtctgaactctctctgcccctgctccttcctttgacgccatcaccctcatcctccacacctgcagatgtgcctgcagccatgcattgatccctatggagaaaaaggagagtggcttcctctctgatgaagataaagagaaccgctggtgagaatcagagggaagcttttcactttctgggacccaggggtcctagcctgggagtagctccatctacccagaaagcctcctggttgacaaagccgttctcttatacacagagttaccagtcatgtagcccaaactccattctcaaatgtgaatggacaacaaaggttcacagacatctgagaaaaacctgtagaatcaaagagaaaaccacgatacacaaacacaaggaatttaaaacaagacaaaaatctaactggtatctgcagaatgagtcaagataatattgcacaaaagtatgagactatgaaaaagaaacaatcagaacaaaagcagctcctagaaagaataacgattattcaataggaagaatggacaacaaagttaggaaaatctctcgaaagatagaagagaaaaaaatagatgaaactatggaaaaacagaaaagaaagacagacatatggagttaattcaagccatccactgtccaactaacagttctagaaagagaatagaaaaatggaggggagaaaatgccaaagagataatagaacaaatttttcctaacctaaagaaagataagactttttaaattgaaaaggccaactgggtgaatcaaaaacagcacatctaaaaatacccttgtggaatttcagaacatcaaggataaatgctttcagaaaaaacaggtcacaaatgaagaatttgccatagaatgttcatgggctatgctgtgtgccagtgtattagtccattttcacactgctgataaagacatacccaagattgggcagtttacaaaagaaagaggtttaactggaattagtctggaaaagactgatttcctccttatctttcatcctttcttcctcactggtggcatagagcttaactctctgtcacttcacccctatggttccttgggcctttataaagcattcaccatttgaactgggatatattcatagggttgccgcatctcctaagtagacttaagatcttctttcttcacaattctccccatattgagagcagagggttcattctatgtattgcatggggggtttgctggtggttagattttctgtgctggctatttcctatgtatccacagttcagttttggaaaatgctgaatggtgactctgccatggaatttgtattttaaagaaactttactattcatatacaaacaattcaaactatttactcaaatctaagtatcatggtagattaatgtacattctctccttaaattacctaatggaataaatgtccacagctgaacctctaagaagtagactgatgcttgcatcttcctcacctggctactggggcagagccagaggatggcatgtttggaatcgccaatgcagtgaggaagggcagctcttgtccaaaagcaaacagcatttctctgggcctctcacctagtgagatcctgagcctgtgtttctgaaatttgctagtaagaggaatgagctttggtggaggatgtgaatttctcctggccattcccttttgttgaatatgagttcattctggtaggaatgatacaaacatggaactaggaaattaggaaagagttttctgccacctgccaagctacttaatggaagttacctggtgaagagaccacctaggctccactagccaaacatgctcagatgggagacagcattttaattcttgtttgctaaggaacaactcgctgagcctcttttacagtaaaaccagatctctggatgacttatgcctaaaagcaataggatggatggaactttgaggccatgttcctgggtctacagaggtccagctatggggcagaggctgggctgatccaggcccaaactcttgaaactaacagatataaaccagacttggcagaatgtggctctcagtgggaaatgctactttcctctactggcatgcactggaaaggaagaagagatccctgtgctctacgtgagagagggccaaccctctagctttcctccccacaaccatgtgagctacatactgcccacagtcaccatgatcctgcaggggggtgacaaaggctattacacaccattcagatagacaggtataaccgcagtgtcagactttacagacatgcaatgagatcacatgtggataaatgccaatttacagaatggtggtgaagcaaacatggaagctgaggcacagcaaaataaaaaggcaatctgttcaatgcccagggcactttcctcctcttagctggactcttcataaagccaggactcacgctgcttacacttcaattcaaaatgcgctcaagtaatttctgtatcaaccacaaacatacttaaatgctatttaaaaagcttttctgaattataaaaatataaaatatgccttaacacaaaacaaggcagcaccattttattaataatgacaataatacaacagtgtgggataaataaataagttgacacagtaaactctaagaaaacttgagaaaataaattccaagcatcgaagctttacaccaacacaccaaacattctgctgtaaaataaaactaacaaaaggggggtagaagctattaaaatgcagacattagtaaaatgcatatagaaaaattaacaggattatattttgaacactaacactagagacagttttgaaacagagaataacagaagcaaagctactgaaattttggcctccgtggtagcatgaagtacacagcagaatgttccactgacacggaccttgacctcgccttagtaagacttcaggaggtaggagtgttagatgcctgtgatgtccctagaagactcatttcaacaacgtagtcggcaagatatgagaagttaacatgaatgactcatgctcaaggaattttcaccccatattttcaaagtactttttgaaagaacaacagaagcacacagctagaagagaaggttattggacaggagtggaccaagactgggagggtaagtaacaggacttggtacctttctgttttgtatcacgggtgggaaagcaaggcagcaggagaccatgtggtgacctcagatgtaccagtctcctctgcagtggtgtgagatctggagacaaccgtatgatattttctttctgcattaacttcatggggatattttcatggggaatacactaaggtctgtcttcccttggtgttttcacgattcatgatgaaaacattgattaacaccccaagggctaaggatttactggccccacacagtataagtttatgaattaacaaaatgtatcatcatttataaaagccactaaattaggcaatccaacagtccatttttaaaatttcgctttacccagctatggaaaacagaaggcgttaagcctcttattaaagctgaaataggttaaaatggttaaagtggctgaaactgaacagggtgtgtgtgtagaccgcttctgctgcagtggagctccaagcagtcagcctgctgctaccttagctctcctttcaatgtgtttcacttacggcccccactgctggtcgatgtctgctcctctctgcacgagaactggaatcgcttcatggtgcttattcataacagccacggttatgacgggtcgattgtcttcatcacagcagttggggtctgctccctgcagcaaacggaaaaggacaaactctccaaaacaccctgcactcaacagcatccagtcgccatcctatgaagtataacagatgtcctttacagagctgatgcaactaaagtgctttcagatcaaaggagaggagaatcaggaacctcaagacctgatctacgatgaacagagctacaaagttacccaggtgacaaaacttctgttccccacatgggcggggaggggagggcaggcaccctgacaaccttgcttctttaggaaacccaggataaaggtaatatggggtcatgggccagagattctatccagcttcatgcatgttccttggtctcatctgtgcttctctgcctattttctctgatataaaaactagcaacagggaacaattaatataaagcttttgactagccattcactatatcccgggtttttaatcaaagggcagtgtaattttcacagtattgaacaaaactttcatctgaaggagacagaggtggaatgccaggctgaactcttcagagagactggctcctttggcaacacttacctcatccagcagctgttcaatcacagagactcttccttcccccgtgggtccgacttccttcagcaggagtctgttttcaggctgcaggattacagaatgtggtcatttcccccacttcaaaatattcactcaaggcaaacactttctttccaacattgaattctaagtcacaaggacaggtgactatgagtgtgtgcatgtgtgagtgtgtgagtggtctttaatagcccacagcacaaatatccacatctaatatcaatcttgctgctccaaaaccttgcttcaggcaaggttaccgcatggacactattttatattaaggacaaggatgccatgagaaacctcacaaaacccagaaactccacactagttttattatgactagagctctaggaaaagcaatcaggtgaatcctaaaatttattttgcatactttataaagtgttcaaggtcagccaaagtatgacagttcagaaaatatactcccctgaggaacgaatgagccaataaattgacttcttctttagaaaaaaaaggaggggcatagtagctcacacctgtaatcccagcactttgggaggccaaggcatgcagatcatttgaggtcaggagtttgagaccagcctagccaacatggtgaaaccgtgtctctactgaaaatataaaaattagccacgtgttagctgcctataatcccagctacttgggaggctaaggcaggagaatcgcttgaatccaggaagcagaggttgcagtgagcggagatcatacaactacactccagcctgggcaacacagtgggactctgtctcaaaaaacaaaacaaaacaaagaaaaagctctcagcaatttcaagatcttttttttttctctgagatggagtcttgctctgtcacccaggctggaatgcagtggcacgatcctggctcactgcaacctccgtctcataggtttcagcaattctcctgtctcagcctcctgagtagctgggactacaggcacatgccactatgcctggctaattttttgtatttttaatagagatggggtttcaccatgttagccaggatggtctcgatcacctgacctcatgatctgcctgcctcagcctccctaagtgctgggattacaggcgtgagtcactgggcctggctgagtaacttatctttttatatttttaaatgccataaattcatctttatatataaagaatttcaaatgctgaaagactgaaggaagctgtttagaaagcaagagacattgcttttagtatgtttctgcctctggatcccgggcatggctgtggggtggtcacaggaccaccatttccatttgtaaagtggaaataataccttccctgtccttgctcctgtgaagccatggccatgaggacactggtcaaggcctctgagcctttcagaagatgatgcctggtccaggcggtgctgcctcctttctcgctgtccccatcttactgatgaatagcttagaaccaagtactctaatcagtaaacccccagcaggggtcttggggagcacttgtttacactgatttccattcctcatggaaatgtgtactagaatgcagtaggcatgtcagcttcaggaggtgtgagacctttacgtcttttgtttaggttttattttcaacacgtagaacagtgcctggtacacgtgtgctcaaaaataatcactgaatgagtgaacaaatgttacagcttctgatacttatcccctaagtgcaaatgagaaaaaaaagccatatacagtggaagattcaggttatacacagagtaaataggtagagtctcccaaattgtaagctgttcagtttatggaactctatgcttttatacccaataacaatatttcaaactgggagaaggtggtgagtacaagaaatcctaaaatacaaaagttgaaacaattctaacatattctttccaaatgtactggtgtttgttacatacaaagcatgtggtgggaagaaaaaaaagataaagaacagagtccctgcctccagaggaatcaggaggcaagctgggcagctagtgcactgacaaggcggcgttgagggcctggccttggaaccacacatggagggaagcacacggcatcatgcaagtgtccagctcggacccgggcccaggccttgggacttgctgctaatcacatctgttctttgtattgcagccaaggaggaccaattaaaaggcaaggctggggatggagcaggtggcatccactgcccttttctccaaagctccttttagaactattcttggcatatatttttaaaacacaaaactctaaagatgtgggaaactctaaaacggtactgaccatcggtgaattagtaattttgagaaattccaagaagactgaaagtagatgaaatctgacagggaaaccaaaccaaaccaaaccaaaccaaaccaacaaaaatccagctgaagataccagaggtaggagtgttttctttccaggggagccctgcagaagcttaaattaatccatatggaggttaggtgttgggcgtagcctgaatgcatgagtagattattaagggctccgtggtgaatagctgagatcgctagtgccttaccccttcttccccatgtaagaagggcaggaggcttgtgcactttgccctgataactatttcgcagaaagcataagatttgcccaacaaaggcttctacttggtgcactggggcccaagaaaggagaagggcagagcctagacctccatgacagacacaggggagggtgtagagggaaaggaaaaaagcttcatcccaagctgaaacccgtgagagcgcttcacacaccaacaccctcaccaccagaggaagaccttttccaccagcaacacaggggatctgaaggctttctcctgctccctgcccacactccctccagggacgtctgtccacgacatgcctgtccactcacacagggacttcagggtccatcctcatgctgggcaccaggccagcatctgcactacccaactagtcttcatttgtcaaacgaccagacaaccaaggttccatatttgaggcaaaccaaagtcgaaagataggcagacagaactgaccccagaggaaacacagagatgattcaggaaactgatgggaactttgaaataactctaattcataatcttgagatactttaaagaagtctaaaggacaaggatgccatgagaaacctcataaaaaaggaacagaaaatgagaaattattcttccattttaaaaaaggtcaaaataaaacctgaaaatcacaggctgaagacaacatccacaaggaccaaaaaaagacacttactataagctgctccttcttttcttgaaaagttttggtcttgaaattctttatccttttgattttttcaatagtatctgaggtactctggctgtagtcactcactgaaatgacacagttggggaaaaaaatgatgcccctcccccaactccccacacaaacagttatttcttacttccacgtccctcaaaagtcagaggataaaatggctatcatagaaatttctatttgattaaacccggcaggagagactcctggagccactctcctgtccaggaaccagaggaagggtgggaaggagaggaaaagagggacttcggtttttaggtccaaaagtgcaccccacaaatgaatttccccaagccctgtaaaggacttcaaaagtctcacctctgacttcagagaagccagagaaataaaacgtctggaacataactgcaagatctgtgaccgggctgtcaaactcttagcagttctctgctatacctgccaagtccatgtgttcctggtcagttgttttaaaattgccagaagggaataactcaccccagctggacctgctgccgcacagccccccatcaccctcggcagcactgctcagaaggtgatcgctgaaattcactgccttgttcaggtaaaggttctggccaatgaaaacatttaaacaccatgaatgatgaggctgctttgtcccactagaaagaaggatctcccttctaacctgctcctccttattaagtacagctctacctacccagagagtggagcctgagacctggatgtccttcctgactcctcctcacctccccagcatgctttgtccgttctgccccttacccgcggctcagtctggcccctcctcctctccctccctgaagccccagccccctcgtctcacattgggaccatcacaatagcctttcaacaggggtctgccagcctccctgcatgtggctgtcccagtcacctttagatcctttataagtgattgtgtcatttctctgcttaaagtccttcaatgtcttggaattagggtgtcatgatgggaaggtctcaggctgccaagtgtgaatcctgggtctgccacttactaacttagtgcccttggaagaagcaggttgcttaacttctctgagcctcagtttcctcacctggaaagtggaaataatatgacctacctcaatggcatgtcgtgaaagcaaaatgcagtaaaatgggcgtctacataatgaggccagacacagaagtctgtgtgcacccggactgatccccctgcaccctcacgtggctgcctgctcctgtcccagggaagagcctgctacttcctgaacactagaacatgcaggctaacaaaagatttattaaacctagggcccaggtgcagtggctcacttctgtaatcccagcactttgggaggctgaggcaggtgatcacttgaggccaggagttcgagaccagcctggccaacatggtgaaaccccatctctactaaaaatacaaaacttagctgggtgtggtggtgtgaccctgtaatcccagctacacaggcagctgaggaacgagaattgctggaacccaggagggggaggtttgcagtgagccaagattgtgctactgcactccagcctggttgacagagcaagaatctgtctcaaaacaaagcaaaacaaaaccaaaccaaaacaaaacaatgacctgggaacagttactccaattctacttgtgagatagctagcacattggaggtgctgctggtggcctgccccattcccactagctggccaggttactcaccccagctgttgtgtagctgctaagagcttactgctggacctccttccccagcaaagtgccctcagtaggtggatgctgctttgccctagaggtcatgctccctctcctccttgcctcaactggggacaactttgtggtttaattcattctccagagttccccttggatcaggctaaagctcaactttgcttttgtctacctgctcattcagtcccttccccttccttgacctgcttctctcacttcccttcccctgaagttcctctctgacccaagctctgctctagtcacaacaattaaaaagagcagttagtgctttatttggtttcaaagcacattcatgtgcattagctcgttagatactcccagcctccccatgagttagacagggcccatgcttctatcccaatttcaacaacaccattagcaccttgccagggcctaataaatgttaatttccctccttttccttggcttctcaattgattgattaattattctgactttttgtccagtgaaactaaagctgctaatgtcaatcaattaatgtttgaaacacatttacaggctctgtggcaatgcccccgtcaccatataaaagggaagatcaaggacacatggccacaaagtttggtttattttatagaagaaaatatgtcaaagggcatatcagcaaatatttttgttagtctttccccaaatcaattatatcacagacatgccatcagacttcagtgagtctgaataagcctgagaactacagaacaactcctgttctcactatatcttcatgtgcctgtctgaggtttaacttgtttatctaattctatgaaattgcttgcctctagtagcatttcataatgtgtgaaacttttcctttctatggattacacagaagcatttctataaattgtctcaatttactaatcggtcagttctcaaatgaataacttctggaggcttactcaccttgtttgagacttgactataattcagtctgatgctaacttcacaaccatcttcgtggacagtagcagagataagcttttaaaagagttgtagagagaattcataactgtgggtgtgggactcattgccttaagtaacagtgtacaaattctgagatgtcaaactctaaatttaaccaaatatttaattaacacagaagaaagtaggaaaagaaaaacagagcaacaaaaactagacgagataaatagaaaacaaagaacaaaatggcagatccaaatccaaccatatctaaactctactaattataaataaactactctaaagagactgccaaattgaataaaaaggcaagatccaaatctatgcattcttcaagagatgcactttaatcaaactacatgactagatgttatcaccttggaaaagatatcctggtagggggcggggacagggcttggtaattaagggacaagtatcacagttgagcagctttctgtgtaagtagcaataggaatttagattaagccaagggacaagaaatgttttcatgaagggtcagatagtaaatattttaggtcttgtggaccatatgttctgtattgtgaatactttactgtcatagcacaaagcagccacataagtaaaggaatgggtgcagctgtgatccaataaaattttatttataaaattgggcagcgggccagatttgtctcaaccgccacagtttgcagatctctggattaggctgaagaaattcataaactaccaaaatagattatcaaaggaaattgggtaatactggaaaatgagatcgtcttgatgttggcctatttggcagcagaagagtacacagcctatttcataaagttccttctagtcttgcgacaaacagaggaaaggtcctctcacagagctgtctttttataatggcaatgtagtatcaaagaaaggacatgggactctgacagggtccgacagatctgcttcaaatcttgaaccccatgagacccagcagtgtagtcttgggcaggtcaccaaacctctctgagcttcaaaattcctgggtgtcaaataaggcttcttctgactatcaactgcggtgtgaaaaaccaccccaaacttagtgaaattaaaccaccaccactttattatgctatggattcagagagggcatagcagagatagcttgtctttgctccacatgtctgaggcctcagctggaagactcaaatggctagaggtggttggatgtctgggggcgggaatcatctagagtctagtcactcatgtggctcatgagcagagatgactcgaggactgggttcagctggcgcacctacatgcggccactccatgtagcttgggcttctcatagcagggtggctgagctccaagaagtgctggaggtgagtgtgccaagcaagagaaagccacatgaccttatgtggccaagccctggaagtctcatggcatcacttccatcatagtccgttagtcaaacagtcacagacccgcccagattcaaggtgaggggacacagattctaccatttgaggggaagacagtcaaggaatttgtggttattttttttaaagtgatcacaaaggtaatacacctcccttgcaggtttgctgtgaaggcaagaatgatgaatacaatgctgatgctgggtgcactgtaaaatggcagctgttatgtcactattgctatatattaacagtgtatgatttaagtgcacgatctggatggattaaattgttctgggacctttcattctgactgttagaatttccaatgtgacatctgagcatgagatgttcagaattttattgtcttaggtcaggtgccccagaagcagactctgagacaatattcatgtgcaagtgatttattagagcagagctcacaaggcagaagagtaagaaagtgtagaaagcagagcaggaaagggaaaggagccaggcaagatgcagtttcaggcaaagtccatggagggttccttcagcctgatcccgtggacacttgtggagtggaaatttcatctcacccacctttcccatcctgggttctgcaatcaaggcccggaattcagggttgttctgagcataacacctgaggtgagcagagatgtgatccagctgtcttctccagtaccctaagaaagaagagaaaccccgccatctggatgattctcctgagactaagaaagaaaaatgatagcatggaacatatgttcttagagaggttaatttcctttgtcaaactttgtgatggactttccttagtgaacctcaactatgctctggaacaagttccattttcctccataactgcttgttacatgtaattaatcatagactattatagaatttcaaaagaggccgagcatggtggctcacgcctgtaatccaacactttgggaggccgaggcaggtggatcacttgaggtcaaaagttcgagaccagcctggccaacatggtgaaaccctgcctctactaataatataaaaattagccgagcatggtggcgtgcacctgtagtcccagctactcaaggggcaggagaatcgcttgaacacatgaggcggaggttgcaatgagctgagattgcaccactgcactccagcctgggcaacagagcaagactacatctcaaaaaaaaaaaaaaagaaacttaaaagaacatattttgattgccacacatggggtcttttctttttctatgattctatcccacctacaataacttacctaatattttattttatttattttgagatgggatctcactctgttgcccaggctagagtacaatggtgtgatcatggcttaccacagccttgacctcccttggctcagatgatcctcccacctcagccacccacgtagctggaaattcaagcacgcaccacaacgcctggctagtgtttgtattttttatagagatggagtttcaccatgctacccaggctggtcacaaactcctgggctcaagtgatctgcttgctttagcctcccaaagtgctaggattataggtgtgagacaccgcacccagcccttacacaatattttaaatgtaccatttggggcttgccaaacgtgtacaccccaatcaatatataaaacatttccatcactctaaaaagttctcttgggtccctttccagtctgcacagggtttaagacacatttgaattagttgccaccatttaaaacttgggagatttcacgtgagtctggtgcccggtttctcatatgcaggcggaagacgcaggggcactgggctcaccttcccacacaggctgaccacctgaggccaaggagcagctggctgctttggacagggcacaggctctccagccagccacagcccctgctgtgccctgtggccacttgactctgcaaacccacattggatcccaccaacaaatgaagacactaagctgaaagcaatcagagggattttccaaggtcatgcagcatggttcagtggaaagagaacataatttggagttcagacaagcctgcgtttaaatcctaaatctaccatttattagcttagtgatgttgagccagacacttaaatctccctaagccttacttttcttacctaataaaatggaactaataccccctacctcatgtgttattgtgacaagagaacctaagtgttcttacttgggttcccctgaaagcagaacctgagataaagacttaggacaggtggtttctttggaaggtgaccgtgggacatgcaaatgatggcgtataaagagcaggacaaggaagggaaggaagaacgaatgtgttaaaaactagttaataccctgggcaactggggcccgatcttgctggggatatgagggaccatggagaacatgtctcacagttgtctgctgaaggacagagaagctaggggatctgctccccggctcccttgcccatgagtgagggcagcccaagtagtgtcaactcccagtgcttcagggttgcacctgtgtacggataggcagccttctcctgctctgaagttggaggcagcaaagtcaagagagataaaattatttaaataaaacagtgagagagagaatggggcacatttgatgaggcatgctagcaatgatgggtgaaaccatccaccacagctgcactgaaaacaagcaggctgagatctggcttggggcatctggagagtccactatgagtaatcgagacaacactagagatcatactgagcctagtgcactgtttgacacaaagtagccatttatcccacaaatatttactgggcacctactattggtcatgtactattctagggctaggatacagaagtgaacagagttcttgccctcaaggatcttacattcttagtggacacagataatatgaaaataaataaatacgtatgtaggagtatgtttaaaatgaggttctgactgagaagctacaatacaatagatctatacttcttttttttttagacggagtcttgctcttgtcacccaggctggagtacagtggcatgatctcagctcactgcaacctccgcctcccgggttcaagccattctcctgcctcagcctcctgagtagctgggattacaggcacccaccaccacacctggctaatttttgtacttttagtagagatggggttttgctatgttggccaggctggtctcaaactcctgacctcaggtgatctgcctgcctcggcctcccaaagtgttctgattacagatatgagccaccgagcctggcctagatgtatatttctaaaatgaaatctcaactctcaaaaaagcactgagtaaggaccttgtgaggaagtcctttggaaagggtcattgtaagactgtgagtccccaggctgaacgagggaattcaaagggactagtttctgctacaggaaactgaaaacctatttctattatccactgctaccaaacaaaacaccccaaaacttagtggtttaaaacatcaaccactttactgcccatacttctgtgggtcaagaatatggtcaatgctctgcagggacggttcatctctgctccacatggtgtcagttgagccatctcaaatagggctatgggatccaagattatttcatccacaaggctaaggcctcagcgaagatggcacaaactactgggagctgtctgggatggctcagccttcacctgcactcattcaaatgtctggagtctttgggttgggtgctggctcaggtgctctgttcttcttcatgtggcatctcttctaattcagtaatctatactgaacttctttacacagtgctgacttcctagagagttaagtggaagctttcagctctcgtaaggcctaggcccagaactatcacggtgtctcttctatcactctctatgtcaaagcaagtcacaaggtcagtccagattccaaaggaagagaaacagcctcttcctcctaaggacaggagggatgtgaggagtgattctggtcatctctgcagacaatctaccacaggtctgataccacatttatatctggaagacttcagtcagactgtgggctgggttttgactcccactaaggacatccagagggcaaagaagatctgggaatgaccaacttctggcatggcagcctagggatttgagtggacctactccccagtaaaattgttagagtaggtagctagggagacatgagcagggcaggaaaggctcccccaacccccagaaatgtcaggtgaccatcaggtgatggtcaggcagttgttaaactttctctaaaataacaattggctgcagctggtgccaggggacagcggtctcccaatagatagaagacacctgaagctggtgatcagcagcttcccgatgagatctcaggagttggacgagtgggatcaggcatgtgcactaagaagaaaaatggcagagtttaactggtacatgacctttctctaggaacactcaatggataagggaatgcctcaagtgagcatgcacacaacttccataaacatacggtgcatgtggtccctcccaagtactggcaggccactgaacatggggacagcccaccaagaggaatcagggtagaagtaatgcaaactctggaaacatgccaatgtataagccccacattaagggctgaacagcacacttgaatctctcaagtcacccgcttggccttcttcaaagtgtacttcctttcgttcctgctctaaaacttttcaataaactttcactcctgctctaaaacttgcctcagtctctcactctgcctcatgcctctcggccaaattctttccttcttggaagcaagaactgaggttgctgcagacctgtaagaatttgccactgcaaacaaaactattttaaaaaacagcaaaatccatcacaagtactttagagccatctagaaatggttctaaagccatacagaaaataaacatttaatgaaaatataccaaaactcagaatcatgagagtctgtggtgtttgaaccatgggccactcccttccacatgttctcagctccactccatataggtgcagatgagtacacagggctccctctcctcagagttcccaaaggggtgtagtatcttccgaggaaggacagggacttcagtatttctcatcctgtcccaattgccctttgcacaggctaagttctggccaagtgtggtcaagagatgggggctccctttctctgctcagttaccactcatgggatagatgttctacctttgatctgggacactgagaatactggggtccagaccacctattcctggatcattcagcacaagtccaatgttgggagaagcaagtcatgaagaacaaaggctacagctgcacatgctctgttgcttacccagcccctaaagcaatggtgccacattgaaaaaacatgccattgtctccatccagagcattggctcagagattttgcccaggggaagaggcaggtcaaaaaacagagttcagaatctctccccaaagaaacagacttcatttgtaacaaagtgtgggaaagttcaagcctaaggctgctttcaaaacaatggagggtgtgttaaaaagcagttaaaagaagactagaagattcattagagatgtgagctaaataggccagccagtttactcagatcagagaaataaacagctaagaagagccctcctgaggtaagaaaaatattcaaacactgacctaaaaaacaatccctgtaaagccaggttgtccaacccacagcccatgggttggacatgtgacccaggatgactttgaatggatcccaacacagattcataaactaactttctttctttttttttttttttttttttgagatggattctcactctgttgcccaggtaggagtgcagtggcatgatctcggctcactgcaacctctgcctcccaggtttgaaagattctttggcctcagactcccgagtagctaggattatagatgcctgccaccatgcccggctaatttttgtatttttagtagagatggggttttgccatgttggcgaggctggtctcaaactcctgagacggcccacctcggcctcccaaattgctgggattacaggcgtgagccaccgcgccgggccacagattcttaaactttcttagaacattatgagatttttttttttttagctcaacagctaccattagcattagtgtattttatgtgtggcccaagacaattcttctagtgcggcccagggaaaccaaaagattggatacccctgctgtaaaggatgccaaatttaattaaaccagtccgtgaagcaatttatgccccaggtcatggttgaaaacaatacaggaatcatccaacaataagcacagcttaatggctaggtgtggtcaggaaagagacaaagagagccctgccaaaccaccatcatcctgtggtgacagggtgcatgccaaggctacactctccatggagtcacatcagaagcttcatactgtgggggtgaaatagagttcactaaaatgaacagacaaacagacaaacaaataacaataacaagcctggaagataggtcagtacccagagttgatacaatatattatctaacacatccagtttccaacaaaaaaatcatgagacatgcaaagaaacaggaaactctgacccaaacacaggggaaaaaacatgcaacagaaactgcctgtgatagcaactagagttgaagatttaagacttcaaagcagccattataaatatgctcaaggaactaaaggaaatcatgcttaaaaggagtaaaagaagagccaggagtagtggaatgtacatgtagtccctgcaactcgagaggctgagatgaaaagatctcttgagcccaagatttggaggctgcagtcagctataattgcaccactgcactccagcctgggtgacagagcaagaccttgactcttagaaaaaaaaaaaaatagaagaaattatgatgcatttcagaaggctgaggtgggaggattgcttgaggccaggagtttgagaccagcctgggcaatatagtgagaccccatctctacaaaaatttttttttaattagccaagcatgatggtgtgcacctttagtcccagttgcttgggaggctgaggcaggagcattgctcaagcccaggagtttgagattgcagtgagctgtgatttgtatcattgcactccagcctgggtaacagagcaagactctgcctataaaaaataaaaataaaaaaagaaggaagaattcttcctgaaataagagaatataaataaacacatgaaaggaaaaccaaataagaatatgtagcagaaaagtacaataactaaaatagataattcacaagaggcgctcaacagtaaatgtgaagtaggataaaaaagaattagcaaactgaaaaataggtcaatagatattatacaacgtaaaaaaaagagagaaaaaggaatgaagaaaaatgaacagagcctaagagacccattggaagctattgagcatgccaacatctacatgagaatcccagaaggagaagagacagagaaatgggacagaaaaaaatatttgaagagatgattgccaaacccttcccaaattttataaaagacatgaatttatacatccaagaagctcaaaaagctggaggtggagcaagatggcagaaaaagcctacatcattcatcctccctgctggaacaccaaattttaacaactatctgtactcagaaaagcaccattacatgaaccaaaaatcaggtgagcaatcacaatacctggttttaacttcatattgtgaaaagaggcatcgagaagggcaggagagacggtcttgaatcactgataccatccttccccatcccccagcagcagctatacaggatggaaagagaatgtgtgcactttggggagggagagcacagtgactgggggactgtacactgaactcggtactgccctgtcacagctgaaaataaagccgtgctgggctcagccagtgcccgcacatggagggagcatttggaccaaccgtagccagagggaaattgctcatcctagtggtctgaacttgaatttctcagcaagcctcgccactggtggccgaggtgctctgggatcataggtaaacttgaaaggcagtctaggacacaaagactgaaattcctaggcaactcctagtgctaggctaggctcagaggcagtaaactcgggtggcacgtgacctagggagacaccagctggcatggtttaaggaggacttgtaatattccttctccaactccaggcagtgcagctcatggcaacaaaagtgactcctttctacttaaggagaggagagcaaggagtaaagagcactttgtcttgtatcttggataccagctcagccacagtaggacagggcataaggcagagccgtaaggccccccttctaggccctagctcccagctgacatttctaggcaaatcctgggccagaagggaactcactgtcttgaagggaaggccccagtcctagcgggattgatcgtctgctgactaaagggcccctgggcccaaataaccaccagcaatacccagggagtatgctgtgggccttgtgctctaatatgtgctaacttcagggaagacccagcacattccaagttgtagtggctatggtgcaagactcattctgtttgagaaaagcagagggaaaagtaaaggggacttcatcttgcaccctaggtaccagcttgaacacagtgggggagagcaacaagcaggctcttggggtccctgagtctaggcctagggccttggacaggatttctggatctgctctgggccagaggggagcccactgccctgaagggtgagtcccaggcctggaagcattcaccacaagctaacagaagagcctttgggcttcaagcaaacattggcagtggcctggcagaatcccctgtggacatgtggaccagtagtggtggtggccacagggagaggttcctctgcctgtggaaaggggagggaagagcaggaaagactttctatgatttgattgcttagctgcaatataatagaacatcaagtaaataattatgtttttttactctaacccttggctcccgacagcatctgtggacatgctcaaggcctggtagaactcaccacctggaaggttaggaccttgggcaaggcccagtgctatactggcttcaggtatgacccaactcagtcccaatagtggtggccacaggagtgcttgcatcaccatacccctagtttcaggtggctcagcacacaaagagagactgtatgtctgggaaaaagaagggaaaataacaagaatctcttcctggtagtccagataattcttctggatcttatctaagaccacaaagcagtacctctacaagtctgcaaaaatcacagtgttatggggcttggggtccaagtcccttcgaatacctggaaacccttcccaagaacaataggcacaaacaagtccagactgtgaagacctcaataaatacctaacttttcaaggcccagacactgaagagcatctacaagcatcaccagcattcaggagaacatgacctcaccaaatgaaataaataagacaccatggaccaatcctggagaaacagagatatatgacctttcagacagaaagttcaaaatagctgttttaaggaaactcaaagaaattcaagataacacagaaaaggaattcagaattctgtcagataaatttaagagagtttgcaataattaaaaagaatcaagtagaaattctagagttggaaaatagaactgacatgctaaaatatgcatcagagtctctagatagcagaactgattaagcaaaagaaagaattaaagtgagcttgaagacaggctattcaaaaatacacagtcagaggagacaaaagaaaacataataaaaaacaacaaagcacacctataagatctagaaaatagcctcaaaagggcaaatctaagagtatttggccttaaagaggaggtagagaaagaaataggagtagaaagtttcttcaaagggatagtatcaggccagatgcggtggctcacacctgtaatcccagcacttcgggaggccaaggtgggtggatcatttgagatcaggagctcgagaccagcctggccaacagggtgaaaccccatctctactataaatataaaaattagccaggcatagtggctcacgcccgctatcccagctacttgggaggctgaggcaggagaatcgcttcaacccaggaggtggaggttgcagtgagctgagatcacaccactgtattccaacctgggggacagagtgagactccgtctcaaaaaaacaaacaaacaaacaaaaaaaccaaatggatagtatcagagaacttcccaaacctagagaaaactatcaacattcaagtacaataaagttatagaacaccaagcagatttaatccaaagaagactaccccaagacatttcataattaaactctaaaaggtcaaggataaagaaagtatcctaaaagcagcaagagaagagaaacaaataacatccaatggacctccaataccttcagtagcaggcttttcagcagaaatcctataggccaggagagagtggcatgacatatttaaaatgctgaaaaaaattaaaaaagttttaccctagaatagtatatgtctggcaaaaatatctttcaaacatgaaggagaaacaaagatcttcccaaagaaaagctaaggaatttcatcaataccagactgtttacaagaaatgctaaagggagttattcaatctgaaagaaaaggatgttaatgagcaagaagaaattatccgaaggtccaaaattcatgggtaatagtaagcacacagagaaacacagaatagcataacactggcattgtggtgtgtgaacttctcttgacttaaataaaaagactaaattatgaaccaatcaaaaataataactacaactttttaagacagtacaataacactaaagagaaaaaacaaaaagttaaaaagcaggggggattaaatctagagtttttattagtttccattttgcaagtttgtttgtttatgcaatcagtgttactattatgcattgcatggctctaccaaaatatctcacgtaccccataaatatatacacctactatgtacccacaaaaattttttaaataaaaaatttaaaaattttttaaaaagaagctcaacaagtttcaagtaggataaacccaaagagatccacagcgagacacattatcaaactgttgaaagaatatgacaagaagagaatcttgaaagaagcaagagagaggtgattcctaaggttcaagggatccccagtatattaacagcagaactctcatcagaaataacggaggccagaagacagtagatcaacgtattcaaagtgttcaaagaaaacaactgtaaagcaagaatcttatagctagtagagtttaacaaaaacagagaattcattgctagcaaatctaccttataagaatacttatgaagttctttaggctgaaagcacatgaccctagagagtaatatgaatacacacacacacacacacacacacacacacaccaccaccaccaccatcaccaccagtaaaggtaattatgtaattataaaagacattataaatgcatatttcttttcccttcttctcaacagattcaaaaagagagtatgtaaaacaatatgaatatgaatataattatacagtttggcctataacatatagaaataagatatattgaccaataacaacacaaagaaggtgggtgaggccaggcgtggtggctcacgcctgtaatcctagcacttcgggaggccaaggcgggtggatcacgaggtcaggcgatcgagactattctggctaacacagtgaaaccctgtctctactaaaaacacaaaaaattatctgggaggctgaggcaggagaatcgcttgaacccaggaggcggaggttgcagtgagtcgggatcacgccaccgcactccagcctgggtggcagagcgagactccgtctcaaaaaaaaaaaaaaaaaaaaaagggaggtgagtaagagcaaagcttcattgggcttaggaaataatccaaaggaataaattaagagaactataaatgggggaaaagaaggctaatataacaaaagccataaataatagttctttttttaaaagacatcatgttataactaataattgtaacagtgttttgagagtttataacatatatgtaaacataaacataatgttatattagaaaataatgccacaaaagttgggaagagggaattgaattataggggtagaatttatatatttcattggaattaatttagtataaacttgaagtatagtctgttaagatgtatgaggaaaaccctatagtaaccactaaggaaataactcaaagtatgtagtgaaaaagtcattaaataaatcaaaatgttacactggaaaatatgcaatgcaaaagaaagcagtaaaggagcaacagaggaacaaaaaaggcatttagaaacatttggaaaacaaaaagcaaaatgataagtccaactttatcaataataacattaaatgtagatggatgaaacaatccaatttaaaaaacaaacaaacagggattgtcagaatggacaaaaaaccctgattcatggtgctggacacaggggcttatgcctgtaatcctagcactctggaaggctaaggtgggaggcttccttgacacctagagtttgagaccggcaacactggcaacacagtgtcaccccatctctacaaaaacgtttaaaaattatccaggtgtggtggcttgtgcctgtgctcccagctactcagtagattgagggaagaggatcacttgaacccaggaggtcaaggctgcagtgtgccatgattgtgccaccgcactccagcctgggtgacaaagtgagatcctatctcaaaagaaagaaagaaagaaaatgaaggtacaccaaacttatgggacgcagtgaaagcaaagctcaaacagaaatttatagcagcaaatgttcacattctgaagaaagatctcaaaatcatcaccctaatctttgaccttaaacgaggaaaagaagagcaaagtcaacttaaagtaagaagaaagaaggaaatcatgatgagagtggaatttagtgaaatacagaatataaaaataatagaaaatcaataaaaccaaaagttggttcttggaaaagatcaatgaaattgataaacctttagtaagattgaccaaaaaaagtgacatctcaagttactagaattagaaatgaaataggagatgttatcaccaactttattgaaataaaaaagattataaaagagtatcacaaacaactgtatgctaataaattaatcagatgaaatagataaatatctggaaaaacacaaactaccaaaactgattcaacaagaaatagaaaatctgaacagacctataaaaagtaaagagtaatcagaattgcccactagacaaacatcagatccagatagcttcacaggtaatttaccaaaatttaaataatagttaataccaattcttcataaccacttcaaaaaaaaagaagtgtttctataaggctaccattatcctgataccaaaatcagacagacagtagaaggaaagaagaaaactgcagactaatatctcttataaatatagacacaaaagtcttcaagaaaatactagcaaactgtcttagtccatttgtgctgctataaacaaaatacttgagactgggtaatttataaagaacaggaatttatttctcacattctggaagctagaagtccaaaataaaggtccctgcaggttaggtgtctggggagggcctggtctctctgcttccaaaatggtgcctcgttgctgcatcctccaaaggagggcaacgttgtgtcctcacatggagggagggccaaaggacaaaaaggggccttaactcattccctccagccctttcataaggcactgatctattcatgagggctccatcctcatgatcaatttccaaaacgtcccgccacttaataccaccacaatagagattaaatttcaaaatgaaatttgaagcatgtagctgggaccacaggcatgcaccaccacaaatgactgctttaaaaaaaaaattgtagagacagggtctcactttgttggccagactagactcaagagatcctccagccttggcctcccaaagtgctgggattgcaggcatgagtcaccacaactggcccaaattatagacttaaaaatagtcaaaatggtgaattttatgttatttaaattttacaattaaaaaaagggataatggcagatagcaatagcactgtgcactaacaacatgccgtcacgacaaaagaaacccacatgcgccatgtgactgaggaactagactacagggctatgagctaaaacatcagaatactgaaagtttaagaaggagcttacaggaagagcttctttttccaatacaaagaaaattacttgaaaaagaggaaaagaaagaaacttacttcttacacatacaaataaatctaaaaggaagagaaaatgaaatgttctttcacagaaagagtgaattccctcccgaccagaagaaagggcatcctcccccttacctcttcctgggctgatggctgtcaggaggggtttatggtcactcattttctcctgcctctgcttttgagaggctagttcctgttccttttttgctagcagcttgccagatgggtagaagaggccaacagtctgtgttcctatgtccctcttagtcccaacatcagatctgggcaaaggaatattcagggactgccaggcacatcggggccatgcgtgaggcagaagacatttttaaaattagaatataatttaatcaatcttgcattttacttatagaaaacaactctaatcagaataaaaagtatctcaagaaaagtgtacttggaactaatagggttttccagcctttgcctcatcttccttgctcctgtctttctcagcaacttccagcctgatccaggattagccatttattatctaaaagtcagcaaatcaaggggtgtttgccggcctgcttgatgcctggaagatatctatccttttcagctctgtaatccaatagagcatagacttcactactaatccacactcagccactggtcaccaacattttctctaacatactttcctgcatctaaacctggggacctgagaggactaccatgaaaggttgtgcgttgcacaacgtcactgcattcaaagtagtaccattcatatggtgaacatcatatatttgcatatgtattagggtaatttttctagtagagaaaccagtatattacaagcaatttccaatagatggcagtcaagtgtcttgagaaaagaacacctttgtttcatttgcacaaaggaataagggctagtggcagtttaggatttaaatctttcaaactgggttaagaaagccatgaacggctgggcatggtggctcatgcctgtaatctcagcactttgggaggccacggtgggtggatcacgaggtaaggagttcgagatcagcccgaccaacatggtgaaaccccatctctactaaaaatacaaaaattagccgggcatggtggcacgggcctgtaatcctagctactcaggagactgaggcagaagaattgcttgaacctgggaggcagaggttgcagtgagccaaaattgcaccattgcactccagcctgagcaacacagcgagactctgtctcaaaaaaaaaaggtcatgaactccctaaaactgcatacaaagtgctgagtgtatcctctaataatgatcaatctttaacttcttataataaagagataagaagaaacatggaaagtctttatccagcttagagaaatgtataaaattataaaaatctaacacaaagccagttgttagagcttaagtacttctgaaaataacctggtgagatttgtcctcaaactatgcccagctgttataaattacaaaagcaatcttatataccctaagctttctaaaatataaaaaaggggaaggaaaagttctcagaatgctacataagaaattcaagagaagtgcattctgtctcatgtattttaaagccactaaagtggcattatgtctacggccttgcaaatgcaattaaaatctaaattgactgcatttatttacacacctagttgaaattccatgtgaaagttctaaaagttttgggtctcttccccgggttgattcacagggtggagcacacacattcagagttacagcctcttcctgggtaccagttcttactacaggggaggcctcacctcagaaaaagggcgaggttcctcagcagctagagccaggcttctgtccaagctaagtttcactagggacttcacacaaataccacaggagccacagaatcgggcagacaggtgattgctggccccacatttagggcaaacagaacagccagcaggaatgccgagctagaggatagaaaatatcttgatgaatattagagttataatttcctcatgtaaattattctcataccatacaaattaacatatgcccagactctctgacccagccattctaccttccagaatttatcctacagatggacaagtacagaaagaagtgtactccaggtcaacccctaaaacactgtggttttaaaagaaatcactgaaaacaacacacatgtccagcaatagggatggtctaaatataacacagtacatacatacaaacaatggattatgaagtcactgaaaagaatgaggaggttactaacaagacaccttgctaggtgaaaataattgggtcagtgttcatagcaccagtttacttatacatgcattgaatagctgaaagaacatctcaagaactggatctgagcaattgcttctgagaggagaactgtgggacttagagagagaggagactaacccttcactctaaaacttttttgttatttgcatgcgatacttaaataaatacatagtcttgagtgttttattataaaggcaggcagacataattcattttaaaaaatgccagtagtcaataaacgagtgaaaaggtttaacctcaaagaaatgcaagtcaaaacagtcatcagagatggctctcagtgtaagataattaattatctctatctccagattcttaggttataggtaccagtagcgaaatcacaagaagtgatttctgcaaggccatggaagaagtgcctggctctctccaggccagtggtgaggtgctcagtatacagaatctcagttttaaaatacccaccatggctccacaccagccgcagaaggacgcctcccagagattccagcgaccacatctgtagcaggaaatggtcccccctttctgagtgggcggaggaggggctttatccccactgcacatcgactggtgaatgaaatggcatttaaaggcaggatcagtactatattctctaatccccctcccaattcaaaaaagataaaaaattcccagacaagatgagccccggaaatagtgttttttttgttttgttttgttttgtttttttcccaaaggagtacagctatgatgagtttcaccaattaataaattagtacatagagctcacattccttcatggagataacagaaagtcaatgaaactggtaccttgcacatcttaatatttttcaatatctttaatatcagggatagcaagccctactgttgatttaacagaacaatattaatgaaggaagaagagagctaagctacctgagcggtcatgattgaggcttatcttctatcctttggagttttggtttccatagaaaaatgtgacttcatttcccattcttgacacatgagaacaattattttatattggggacagaggcagaattgttttgtgagaattcctgggactatgttaggtaaacctatatttgaatctgttgcttcctcactattgcctggtaggagacttgctcacttcccaaatgggagtgacagcacagtggctgctacctgaccacccaccatgtgcaggctccattcccacactgccctgcaccctcacgtcagtcccactgtagacctgggaggtgggtgctgtcattgtccccatcttacagagggagagcttggggacacagagagggtgagatgcacgattagagccatctgactctaaagcctggcttctctccctgactccatacagccccttcaatacaatagcttactcccaggtctgtagggagtttcagacgattacccacagttaagtggataggaatgcttagcacagggccaagctccaccggccagcttccttccggtcccaccttcctttccactagaccctgatttcttcaggagaaaggactataatttcacttttattccccgcactaggacagtcctggtaccttggcacatgggagtcattcaaaaggttttactgagtcaatgaatgactgattcaattggtaactgaatgtgtattaccacatatgccaggcacaatactaagaacacgcacaccagggaaaacatttgctaagggcacttttccctaaagacacacattttagttcactctatctgcccagctctatcccgttttgcttcagggaccgctctgttatctagaatagaaacctactcaagagaggccacatcagcccccagcattcatagacacccgagaacagagggcctctttgtgtgcgcttgccttcatttctgtgcaattagagggaaactccttcaggtaaatcaaagagaaattctctgcaaacttttgcttcagaacttacatttcaattatcctattcttaaaacaggattttggcataaaggttgctgaccttggtttctaaatacaaagccttcagacttttcattgaaatgtactgactgttcaagtggcttttaaacataacattgctttaaagaaagaaaagttatctttctggtagtcttactgatcaaaaaaacaaaaaaaaacaaaaaaaaaaaagaagagaaagaaaagttatcttaccccatcatattaatgctgctaaacaaagaaaagacataaagctatcagaatgaacatgcattgttacttctatggactacagagataagtattatcctgtggcatctaagctctgatataccattcagatagaaatacaatttttagaacaaattcaattttgggattgttctgaaaatagttttgttgatagatgagacccagaaacagttacatcactgacagttaacaaaatcaatttaaatggttttattatttacataagaagtcctgaatgcctgaggaaaggatgtctgagaaaatcttttgctggcaatttactgaaatctatctgtaagaatatttcaagaattccagaagttccactgttttctatttttatgctttcccaatctcactattactctctctggtgccttggaaaaaattatagagtgtcattttatgatgagagagtgatatcaagtctaaaaccacattaatagacaactctcaacaaaagagaaccctaaaattacatcagctttgatgtggaaatagatgtgttttctgatgaaattcaacacctcattagtttgtttttagtctcagttctgaaaaagaaacacatcgtatgtaacagaaatcatctttttttaaaaaaaactacagatttttccttctggtaatgatagcataagaccataataaatgactcccacacaaaaaacaactataaaatctgctgataataggccgggtgtggtggctcacacctgtaatcccagcactttaggaggctgaggcgagtgtatcactagaggtcaggagttcgagaccagcctggccaacacggtgaaacaccatgtctactaaaaatacaaacattagccgggcgtggtggcacatgcttgtaatcccagctacttgggaagctgaggcaggagaatcacttgaacccaggaggcagaggttgcagtgagccaagatcatgccactgtactccagcctgggcgacagagcatgactctgtctcaaaaaaaaaaatctgctgataatacatgaaggcagtagagaatgaacagaagcaggtagagttgcagcaagtacatacaagcaggaggggagttatacaaagtcagttcccatcgtcacagttttcagcctggagctaagggtagtctacatagcgcatgtgaagcggtgggcacaaggcagtatttctggccaagagaaccagaaaactgaagctggggaatatttggctgctgaagaggcagggagctcccagaaagaaacaagaaagagagaagatcttctctgtgtattcagatcttttaccaatccttgaacaacatatgtacagaataggcttgaagcagttcagctaaagataaaatatctgaatggagaccaaactttctgtccctcctcccctcaaatttttttcttggtattcagtatgttgaggaattttaaattgtaccctagcattatgaatgttcagctgtggtactttctagattctgttactctggggattttgttgtttgtttgctttgttttagtaggcaatgatatatatgcttgcttttggggaatgtgctgcctggaacaaactataactagtgcttcacacacaaaattgatcctaagatgaatcagatgttgaaagaagcaaaccagaaatttaaagcatattctgtccacaatgaataaaaagaggaaatctcagcaaagaaatagaaacaataaaaacagaaacaagtgagaattctggaatagaaaaagataatatttaaaataaaatatttactagacggactgaatagctaaaggagatggtaaaggaaagtgtaagtgaactggaggatagatcaacagaaatcatacaatgtgaagagaaaaaaagatttttaaaaaatgaacaggactggcgcggtggctcatgcctgtaatctcagcactttgggaggccgagacaggtggatcgcttgaggtcaggagtatgaaaccagcctggccaacatggtaaatcctcgtttctactgaaaatacaaaaattagccaggcttggtggtgcacacctgtaattccagctactcgggagggtgaggcaggagaatcgcttgaacctgggaggcggaggttgcagtgagctgagattgcgccactgcactccagcctggatgacagagcgagactccatctcaaaaaaaaaaaaaaaaatgaacagaacctcagggacttattagataatatcaaacaattcaacaggtgtgtacatggacttccagacggagagtagaaaatgagtggagtagaaaaataaagaaatcatggccgaacaattcctaaatctgatgaaagacagaaatttacagcgacaagattctaaatgaacaccaaccagaattacttcacactaaagcacattatagccaaactgctgaaaaccaacaataaagagcaaatcttaaaagcagcaagagaaaaatgacacatcccgtacatgaaaatgtcaatttgatttacatttgacttttgagcagaaagcatggaggccaaaagagtgtggaacagctttaaagttcagaaagaaaataactgtcagcccagaattacatattcatcaaaaatactctttgagaatgaagttgaaataaagacattttcaggtaaaagagaaccaagagaaatcactgccagcagacctgcactctaagaagtgataaagggagttcctctgtgtgaagggatatgataccagacagaaactcaggtccacagagaagagtaaagaacatcagaaatagtaaaaataaatattggtgtaaatacaaaaaaaaaaacaaacagctttatctttttggttttttcctcttaattcccttacaagcccttataattgtttaaagtagaaattataacacctttctagccaattgtactctgcagaaaacatgcagcttctctgacatgaagatttaaagtccctgccccaaataggaccccaaacaacttttctgatgcttattgacaaggaagatgaatgagatagcgggcattttgtgcatccttcttcttattcgcaaaattgctaataatggtcagtgttttaaagtctccaaagctttatgcctcagatgctcatccaaacactaggtggcaaggaggtcaacatccatgtcaaacgtataagcttgcacccataggtgtttacacagcatccagttcaagctgctggctccgaaaatgcatgctgagtgcatggagaccccactgcagggtgggtagggagcatccttgaaaacgtcatcctcagagtactgccacttgacaaacctagcaacggcatgcattccagacaacttgtacttatggcttaaggcgaatgagccagggacttcagcgatccttcggatgatggcctagagatacttatctgggctgtctgtgcctcgcacccactccataaacttttgggttttttcatcctctagcacatgccccacatactccctactgaccacaaaataggcactgcctgaaaaaatgggtgcttccagcggaggatgccctttgacagtccccacatgtgtcagctttccattaatatctgcataccactttttccacctttcttctttattggatggcatcctcttggctttgagactgtcttcacccattaacaacttgagcttcctaacaattttaggttggttttaataggaaaatccatactacaaacatgtattaagtacttccagtctgcactcactgtgcagaggtccctcatgcagttgaggtcagccagaacccgactccacaaggcataaaccagactctccaactgacaggccacaaagatgttactgaaatgacccaatgcccatcactgcagctaaaaaggaatctgctgattttttttgtccacatgaatgcaatagaaattctgaggcatatagatggctctctggagcctgtcaagcgtttcagttttataatgaaccagtatagaatatgctattggaaacctcacctcttccttcttaaggggttctacaatatatctacatctcttgatgaaagaagtacatgaagaagtacataactggtcatgtttataaagccgtcaggtatacaccaagggcacttagtaaatttcactgttagcatctcaagttttaccttttggatttcatctacatcccccccgtaaaactttggtgcaattaatatgactactaggattctctccaacaagctccacatatgtgacgcttacagatttggacttttgatgaatccttaaaacggaggtgactagggaaaaaataagaaccacaaagtggtatttagtgggataagaaaaatgtctccacagcaactgcctcagcatttcaaatgccaatcagggactttgcttggttaagggcagtcttctaggctttaagcaccaactatttcccctccattgtgccttgagggttgtcagtttgcatttatcagaagctcaaaggcaccttgaaatgaagaatgccgcatttagaattaaggaaagtccagatcacttaggactctgattccaggtgacatcctgcacttattccaagtacttttcatgctgtcaggcatcttaaatgtactaggcatccaggaataatggtatgtcccataggcttttgaaaaaatctctccctgggtggcttgcaatgctcagctggatttgcaggtgcctcatccaccctggagcatcatctggccccagagcacagcagtttgccctaccatgcagcttctgctagcagaagccatgcaggactgctccctttgcccatttttaatggcattatttgtttacttactattgagttgtttgagttccttatatgtactggatattaatcccttatcagatgtatggtttgaacatattttcttccattctgtaggttgtctcttaactgtgttcattgtttcctttgctgtgcagaagctttttagtttgatgtaattctgtttgtctattttttgcttttgttgccggtgctttgggggtcatatccgaaaaaaatcattgcccagactaatgtcataagctttttccctatgttttccaatagaagtttttcagtttaatccattttgtgttgattttagtatatggtgtgagataaggatctaatttcatgcttctgcatgtaaatatccagtttttcccaaaccacttattgaagagactatcctttccccattgtgtgttcttggcacttttgttgaaaatcaattgatggtagatgcatgaatttatttctgggctctctattcttgtccattggtctacatgcctgtttttatgctagtaccatgctgttctgattactatatgctgaatatctctaatctgaaaatctaaaatctaaaatggtcctaaatccaaactgacctatgtgatgggtcacagttgaaatgcagtcaaaactttgtttcatgcactatgttatttaaaatattatataaaattaccttcaggccatttgtataacgtgtataagaaacataaagaatttcatgtttagacttgggtcccatcatcaagatatctcattataaatacataaatattccaaagtccagaaaacctaaaatccaaatacttctggtcccaactatttcagataagtgatactcagcctgtatagctttatagtagctcaggaagtgtgatgtctctggctttgttctttttttttttttttctcaaaattgatttggctattcagggtcttttgtggttccatacaaattttaagatttttttctatttctgtgaaaaatgtcagcaaaattttgatagggattgcattcaatctgtagatctctctttaggtattatggactttttaacaatattaattcctccagtccatgaacatgggatatctttccatttatagtcatgcacgacataatgatattttggtcaatgatgaactccacatatgacagtgggccccatcatattttatagaagccaaaaacctctatcaccttgtgatttgtattacaagtgcctagaacactgagtaaagtttgcaacctaggagcaataggctataccagatagcctaggtatgcagtaggctataccatctaggtttgtgaaagtactgtacatgccatgatgctaacacaacaatgaaacaacctaacaatgcatttctcagaatgtttccctgtcattaagtgatgcattactatatttgtgtgttcttcaatttccttcatcaatgttttatagtttttaatgtacaagtctttcacttcctatagttggagctttccaataccccgttttcattatttgctagaaaaactagacaaaaataagcaaagatatataatatctgtgcaacattccacattgatttaattgatatttatagaatacgcaacaatgacagaacacacattcttttcaaatgcacctgatatgttttccaagttagatgctgggccataaaataaacctcattaatttaaaataactgaaattatacagagtgtgctctctgaccattaatggaattaaatttgacctcaataagagtaagataagtagagaaagtgcatatgttttggaatcaaataaataagtcataggtcaaagaagaaatcactgataaatgagaaaatgttttaaactgaattataatgaaaatacataggatgctgccaaagaagttcttagaaatttatagtttgtgttagaaaataagaaaaatttgaaatgaataatttgagttctcatcttaaaaattagaaaaagaaaatcagattaaacccaaagaaaagagaataaataaagagcaaaataaaaaaaataggattcaaaaaaatagagcaaatgaattaaccagaagctagttctttgaaaagatctagctagatcttgaaaagatcaataaaatttacaagccagacagagagagaaggaatgataaagaaagaacacacatattacaaatatcaggcatgaaagaggggaatagatcctacatacattaaaatggtaaaaagggaatatcatgattaaaatgattggtgataccggccgggcgcggtggctcatgcctgtaatcccagcactttgggaggccaaggcgggtggatcacctgaggtcagttgttcaaaaccagcctggccaatatggtgaaaccccatctctactaaaaatacaacaaaaaaattagtcaagcatggtggcaggcacctgtagtcccagctacttgggaggctgaggcaggagaatggcttgaacccagaaggtggaggttgcagtgacccaagattgtgccactgcactccagcctgggcgacagagcaagactccgtctcaataacaacaacaacaaaaaaaaaaaaaaagaaaagaaaagaaaaaaatgacaggtgatatcaagtgttggagatgatgcagagaaactggaacctttatatattgctagtagaaacacaagtgatatgccagcaatatatgaatgtataccacttctgttcctaccagcaatatatgaaggttccagtttcatatagggcagtatcttataaaattaaacatgcgtttaaataggacccagcaatcctactcctaggtatttacctaagaaaaatgaaaactatgcccacacagagatttgcatgtaatgcagcattattcatagtgtgccggcactggaaacagcatgagtacctgtggatgaatcaaccagtagatccatactgaggaatagtactcaacaatcaaaatgaaaaaaaaaatcaatacatgcaacaacatgaacgaacctcaaaaacattctgctaagtgaaggaaatgaagcactcacaaaaaactacatacttccataaaagacaaaatcatagtgtcaaaacagatctgtattttttgggtctggtgaccagggaagtggctcaactagaaagaagaatgagaaaacttttcagggtaaatagaactgttaaatatcttcattgtggtggtagttaaaatggctatatataattaccaacattcatcaaactgtacaattaaaataggtgaattttactgcatataaatcatatctcaataaagctggaaacaaaaggagttccctcaaatcaactactcttagactgtccgtgattagacgacattaaaaggtatcttgtcagagggcgcagtggctcaagcctgtaatcccagcactttgtggggccgagttgggcggatcacgaggtcaggcgtttgagactagcctggccaacatggtgaaaccccgtttctactaaaaatacaaaaattagccaggcgtgatggcatgtgcctgtaatcccagctactcaggaggctgaggcaggagaatcgcttgaaccagggaggcggaggttgcagtgagccgagactgcaccactgcaccccagcctgggtgacagagtgagactccatctcaaaaaaaaaaaaaaaggtatcttgtccaactccactgctataggttgaattctgtctgcccagaaaaagataagttgaagtcctaactctcagtacctcagaatgggaccttatttggaaaaaggtctgtacagaggtaatcaagttaaaatgtggtcattagggtgggccctaatccagtgtgactggtgtccttatgaaaaagggaaatctggacacagtggcatacacacacaggcagacacagagggagagctccacgggatggcaaaggcagagactggagtgctgcatctagaagccaagggaagtttgaggctaccagaagctgggagagaagatgaaactgttcattccctagcaccttcagagggagtgtggccctgccaacaccttgattttagacttctagtctccagagctgtaagacaatagatttctgtcgttgttagccacctagttgatggtgcttaggaaactagtacacacccatttgataccggtagaccaggggtccccaacccccgggccatggactgtacttatctgtggcttgttaggaaccaggccacacagcaggaggtgagtgctccgcctcctatcagatcagcggcagcattcgattctcataggagtgcaaaccctattgtgaactgtgcatgcgagggatctaggttgcgcgttccttataagaatctaactcatgactgatgatctgaggaggagcagtttcatcctgaatccatcccccaaccaggtccgtggaaaaattgtcttctacaaaactggtccctggtgccaaaaaggttggggaccgctgctgtagaccataataaccacattgtccagtttcatgaggaatctgtccgagatgagaacaaacctcacaaacaatcggaaacatgcacagcaacccaaaagaagcaagttggctagtaagtgccagcttcttccggtacaaagcaagagtcacctggaagtaattttaattttcatcagaaacgttttataaacataaaatagatcatcaccgtatttaaagtgcatatactcgtatttcttcccttcaacattcaaaataggctggcaggaaacccaagaaataggtggctacaatgttctcaatttcaaaaagcagtgtgcatacagagtcaacgaagacaatggactatggggtgtgggaaggtggaggggatgacaaagacatacctgtctgtaaatgaaatgtgaatgagttcacttccccacaggctaatgccagcctcccatgcaaagttattaaacaaaatcataagaaattattgattttactgaatcctcttgaagttaagactttgaaaacaatttgtattgatataaagttctccccacatatggaaatcttgctttcagtttaccatgagaagctttttttggtctctctccccaaccccctcggcagattctgtttctctattatcattaacattgacatagtagccactaaatataggattggcacatgcaatcaacctacctcttgtgatgaaggcagggccccctcacaggtgacacagtatctcaggtgagcaggatttcctgtaccacaggcccggcaaattaccttctccttaacaacaaaaaataagacatacatgttcctctgagcaaacaactgtgcaaagaaatcatcaaccagtcttttctgtcagtcattcagctacaggccctattactgcacccaggccctgaatactggattggtttaggagttactgtaaatagtgtcagacaaatatctgtaggtttttttgggtttttttttttccatttgtttttgtagagatgggatccgactgtgttgcccagtctggtgtccagctcctggcctcaagtgatcctcccacttcagccccctaaagtgctggaattataggtgtgagccaccatgcccagcctgaatgtagttttaaaagaaacaaaaccacaaacaaacaaacaaacacactgaaaaaagtattcgtttggttttcaaaaggtaagttggaaattctgcactggttatgtgtaaggttgggtgtgtgtgtgtgtgtgtgtgtgtgtgtgtgtttctccagtgtgaaaaccgtgacactgagtagacgttccatttcatggcttaaacagtaaacagaaagaccctagaccagcaagggattatctgtgtgtttacaagtaatctggttcttggacttgggtttaccctctggggcttcatgttaaatatgaatttaggtttgctctgtagtttttacttagaaatagaagaagtgaaaagactgccaaagaaagagagtagtggctgggtgcagtggctcatgcctgtaatcccagcactttgggaggctgaggcaggcggatcacaaggtcaggagattgagaccatcctggctaacacggtgaaaccccgtctctactaaaaatacaaaaaaattagccgagtgtggtggtgggcgcctgtagtcccagctgctggggaggctgaggcaggagaatggtgtgaacccgggaggcggagcttgcagtgagctgagaccgcgccactgcacaccagcctgggtgacagagcaagactccgtctcaaaaaaaaaaaaaagaaagagagtggtaagtacaacttaatttttttcttttttttgagacggaatctccttctgtcacccaggctggcgtgcagtggcgagatctcagctcactgcaacctctgcctcccgggttcaagtgattcttctgcctcagcctcccgagtagctgggactagaggcgcatgccactacgcctggctaatttttgtatttttagtagagatgaggtttcgccatatgggtcaggctggtctcaaactcctggcctcgtgatctgcccacctcaggctcccaaagtgctgggattacaggcgtgagccaccgtgcccggccgtaagtacaactttctaagccaggaccctggggttacactgcaatacagagaaaaacaacagacaaagaaatgatggtaaaaatagtctggagttcagctatcagaggttttctaacacgtttagttactgaccactattctctcaggatacaatctttttccattgataatgaccagtggtgctcaagtgttcctttctagtccagcactgcggtccctagatgtcctgaaactaatatatcaaacagtgtgttcagaagctgatacaggtaaagtggatgatcaagaaaaacaaagcccagctcccagggttttatttccactaccaccaggtagctctatggagtctcagccttttaaagtctggttaactccattttagtggaagattccaaagtcttcctaggcactgagccaacgcaccacagttgccaatctaaacaactcctaaagggcagaggccaactgactgctattaaaaatggcaaagaatcacactcttgctctcaatggttcctgacactccctgggggccaacattcttcaaagttacttaaagttgccacagcataatcagcaattggccagcatttatctatgagatttagggctgtgactttcctgaaaatgttgcctcagaaaagatctggtgaaacccattgagaaatgagacaaatttcctgtctccatgttaaaaaatactgagatcaaataaaagtaatctttctgtatgctacagaaaatacttcctctaggaagagaaaactggagaacaactaaaattgcttacttctcaagtccaacggcttccttcaagacctcaccttgcagggctcataatccaaaactgcttctcataactttgcccagtgcatactctgcccaatccctgccctgccttacaaaaccctgtttttttaaattttaattaataaactttaaactttatttttagagcagtttaaggttcacagcaaaattgagtggaaattacagaagattctcgtataccctgtcccacgccacagacacggcctcccccacactatggacatcccacacccaagtggtacatttgtcacaaccaatgaacatcactgacacatcattatcacccgcagcccatggtttacattagggtccagcactcactccgtttaaatacctttccctgccctccttcttctgagatactactatgaacttgtctaagtgatggtctactttactgcgtcaggtctattaaacgtagttttcttggttgacaggtttttctatgtttttatttgtggagacttttgacaccatgccatggctcacttctttctagagcagtgaccacgacccacagttagaaatcattttatatcacaatccactatactcataaattcacagatgtctgtggcggtgatttggaattgaggctaccatcagatggccttaatggggatggcaaacacctatgatgagaacttttaaaaagtcaatatcctcatttgctatttcatccacagcctttgcaacatactgaatagttgaatgattctaagctatttaacagagccacttagtcactgggataaaacttttccttttaaaatagttggaagaggagaacaattttcaaactcccaagtgataagctttaagtgacacaattaaaaaggaagaatattgaaaacaaactagtaggtcattgcaaacttaatctcaaaactgactaagataaagttctgcttgaggtggagttatggttacactggccttaaccccaaatcacggtgtgagaggctgggactcactgaaggcacctgtgactcaggcacaggaattatcagatcttttcaggagtatttcagacctaagcctcataaattctaagaaccataaacatgactgaagtcctggaggtatattgcatgttgctcgtaaaatcccaaaggaaactgtagtagctcttcttgataaatgtttttagttaacatcttctggtgaacagggatgctaaaattagttttcaactttagaaaacggccaatggaggccaggtgcggtggcccacgcctgtaatcccagaaccttgggaggccaaggtgggaggatcatgtgagctcaggagttccagaccagcctgggcaacaaggtgaaaccccatctctacaaaaaatagaaaaattagcctggcgtggtggcatatgcctgtggtctcagctacttgggggcctgaggtaggaggatcacttgatcccgggagttcaggctgcaatgagccatgatcgtgccactgcactccagcctaggcgacagagtgagatcctgtctcaaaaaaaattaataataaaaataaaaaaagaaatgaccaatagatgcatttgttaagtgaaacaattaagttgcgaggaaaagtatataacatgatttcattttgtttaaaaaaccaaaccaaaccaaatctaaatgtatgaatatacataaatatgtttctgtgaatctagaaaaatacataaaaggacactctaagctgctaacgttggttatttcagagaaatagaaatggaggtagagtgaagaaattatacactttttggtatatctttggattatttcatttgttacaaaaaattaggtattaattattttaaataaataagttgtaaaatcttctcttattctgaaataggtatctttgccaaaggtcaaatacagaaacttctgctactgtatcttctaatcccggcagaaaaaaaaaaaaatctgatagagcaaaattcctcagcattaacagtgccttaaatccacacaagactgcaactaccatggaatctgtcttcatcatagaaggaagagcgcagatggtgcttttgcactcagtggagtgagctagagaccaacgcagaaaggggacgggagctgtcaatggcatgctgccgcctgccgggaggtaagacttgctgacttccctgagcagttcacatgagtattcccaccaacttcagaggtggctgtctgggtgagaatgttatctcaaaacctgtcacccttatgacatctgggagaggcactggaatgaagattgtcaggccagggtttccaaacagatgtccttctgtgagtagaagcagtaatagtgattgtctggcataaaaagtcacacacttctctccagcatcagaggttatgatgataaaaatctctctacaaatcaagtctggttaaaacctgtccccactttcaaccttcagggcccacagggaaaaatctgagctacaaagtctggtagagaaggtgccatctcctataacccacagcaccccagcattgttgcagcccagcaaaaccaaactccttgcaaagttttgaggcacattttctaaatctcatctttgaattcattattgatttcctcattatatgttctaactttgtctcacctatggagtagaaataagttatcaaattattcctattataacttattatgtcataaaaatgtctcttataaaaattgccctgcaagaaagaggccattcctggatttaatgctgcttatcactgtagaagtcctgtgtttattctcaatataggatttacaacaaattgaagggaaaaattacttacatgtacctttgtgtctctctgccttcccataaaatgggaagaactctagatttcaaatactgaagatgatattatatatattgagtttgggtcacaactaacacttacccctattcttcctgttctgaatagtccaaagagtttgcagtgatattatcttcaaacatcctgaataaatgtattaataagaatagatttgctgtgcttgacagaacacccaaaataacacaggcttaaataagagaaaaatagatttctctctcccatatataagaagtctggagaaagacttccaggactgtatagtggcttcctgcagtggctttttaagcatcttaagattgaaaatagtcattgaacaaaaagattagtaaattttcctctacctgactttggcctggccagttattcaaaatctcatttctgaaggctcacacagccttgtacacttgtgaactcttcatgctaaagggagcttgaaggtgaaagaaaaagtggatttatcttttctctgaatacattttgcccatatacaacccacaaggccattttaggagtgttatggcctgtacataatgccatgcatttcccttattgctaaaaattcttagttttttaatcccccaaattccctctattaaatctattttatcctctagtgacctttacttgggattaaagaggaagtaaatgggactgtaaattgaagaatggagaaaatatttagttgtatgtttaaagattctatcaaaaaaatgttcacagtatgatatcattttttgagcaaagttttttggatgtaagtgatgatacataactttttcttccatgtgactagttctagtcattctttttctccataacaagaacctataatcaaataaggcaaacaaaagtatgagccactttaaggacaaaattataaatcaacactaactgcaatgttggagtttaaatatatgaagtaaaaaattgtctttgttagctgtagtgcaatttgccctccaaatccatgttcagggaatacaatcctacatatctctcttaatattatagatcctattggcaaattaaactcttggacagcataccttactaaaaatagaatggattttgttcatgtatattagcttatcaattgttaccccatcctggcgggcatggtggcttatgcctgtaatccagcactttgggaggctgaggtgggcgcatcacctgaggtcaggagtttgagaccagcctggccaagatgatgaaaccccatgtctactaaaaatataaaaattagccatgcgtggtggtgcacgcctgtagttccagctactcaggaggctgaggcaggagaatcacttgaactgaggaggcggaggttgcagtgagctgagattgcgctactgcactccagcctgtgtgacagaacaagattctgtctcaaaaaaaaaaaaaaattgttaccccatcccactagctgaaaaaggacatatacctgttcaaacattactatgtatttcattcatgtttttacagaatcacatttcattaccttcaagtggaggcttgcctgtggctgcagctgtagagcaagaggggcctcacacaccacacagatgggagtgttcatgggtaccaagcttctgcattctgcacacaagcccatctgcacaaggaaaaggtctggtttatcttgcacataaaaactgaaggtatgaatagatcttagaatgtaaggtttggtctacagccgtaccaccctgaacattcccgatctcatctgatctcaaaacctaggcaggtcgggcttggttagtacttggtggaagaatgtaaagtttgatttgtttttgtaaaacaattttttaaataattacctttatgatggatatgctaattactctgatttgaccactacacattatttgtatcaaataacactatgtaccccataaatatgtacaattactatgtgtcaattaaaaagtaaataatagaaaataaaataacaattacttttattattttattcctattaagagtaaaaacatgttcattgtagaaaagagagatgttaaaaaaaaaaagaaaaatatccataggaaattgtagcatgatggaatgaggaggtctataaatcctcttccccaaaaatgaatcacaggctgggtgcggtggctcatgcctgtaaccccaacactttgggaggccgaggtgggtggatcatctaaggtcaggagtttgagaccagcctggtcaacatagtgaaaccccagctctactaaaaatacaaaaattagctgggcgtagtggcgggcgcctataatcccagctacttgggaggctgaggcaagagaatcacttgaagccaggaggcagaggttgtagtgagccgagatcgcctcactgcactccagcctgggtgacaagagcgagactcctgctcaaaaaaaaaaaaaaaaaaaaaaggaatcacacagtcagatactgctgtcaaaaagcaaccacttcagcaccctgaagtcattgaaaggcagataacaaacagaagttcctaaaaatgactgaactgcagaaaagaacactaagctctgggtggttgttgcctgggctgccccctccttctctaactctgtcagtgtggtagttccaccagggcagggcaggctgtgaaaaccagaagttttgtggctgctgatgggcaaggatcacttgatttagagcactgttaaggtgacgattttggtggcaagcaaacaaggaagaccagtggtcccctagtctgagataatgagcctgtttggggtaatcgatgcactgactggcaaactggccaaggatttaacatggagttccaggaggtaattcaatgataggggcttgatagctctccacatagccttagttgacaggaggctatgcacataagcaacataaaccagagtaggcccaagccacccacaccgccctggctgatgggaactacacatagagaactgcaagagagctcggcatagagtaaaagctggggctggaaaacagccttgagtttcaatgttacccagccaacacacagatccatcagcagggagtggaggctttcctggatggagctgcctgtgtacaatctctggccaactgaacactaagatatgctgacccaaaggtaaacatcaggcttaaatataagagaaaggaaaagctgctgctctactatttacgacagcaaagtcttggaaccaacccaaatgcccatcaatgatagactggataaagaaaatgtggcacatatgcaccatggaatactgtgcagccacaaaaaagaacgagttcatgtcctttgcagggacatggatgaagctggaagccatcgttctcagcaaactaacacaggaacagaaaaccaaacactgcatgttttcactcataagtgggagttgaacaatgagaacacatggacacagggagaggaacatcacacaccggggtctgtcgggggtggggggcaagaggaggaaaagcattaggacaaatacctaatgcatgtggggcttaaaacctagatgatgggttgatgggtgcagcaaaccaccatggcacatgtacacctatgtaacaaacctgcatgttctgcacatgtatcccagaacttaaaagtataattaaaaaaaaaaaaagctgcttctctgtctatggagtaaccattcttttgtttctttacttctctaattaagaaaaaaaatttaaaaaaaataaaaagcctgacactagtggccatgccttgcaggggaggcagacattaaagatttaatccaagtaaacaaaacacaaaacaacaaccctcggggaaaaaagtcagaatccagagttgctagaatatactacctgacgcagtcaagaaaaaacttatgagacatgcaaaaaataaagtgacctacactcagaggaaaaatagtcaatagtccacagaaattatctctgagtgcctttacatgctggatttagtagacaaagatttcaaagcagctatttttaaaaaatgttcaaagaactaaaggaaaccacatttgataaaaattaaagtatgatgacaatgatctgactggtagggaagcacaatagagagacagaaattatttttttaaaaaaagaattcagtcaaagcctggagttgaaaagtaaagtaactgaaattctaaaaatcgccagaggcgggcgcctgtagtcccagctacttgggaggctgaggcaggagaatggcgtgaacccgggaggcggagcttgcagtgagccgagatcgtaccactgcactccagcctgggggacagagcgagactccatctcaaaaaaaaaaaaaaaaaatcaccagagcgactcaacagcagatcgcataacagaagaaagaatcagtgaacttgaacaaatagctcaacagaaattatctaatctgaagaacagagaaaaaagactgaagaaaataagcagaacatcaaaaacgtatggggcaaaatcaagcacagcaacaagtaagggaaagagagaaaggaacagaaaaagaatggaagaaacaatggccaatatttcccacactggaggaaaaccaatactcagcacatccaataagctcagtcaatcccaagaaagacaaacacaaagagacccacacttaaacacattataatcagactgttgaaggtcaaagacaaagagaaaatactgaaagtagcaagagaaaaaaccacgcatcaaaaacaatggagggcaaaaggcagtagaatgacaaattcaaagagctgaaagagaaaataattgctaaaccagaattacatctgcagcaaaccatccttcaaaaatgaaggcaaaataaacattctgacgtacacaaagacagagagaaatggctatcaggcatgccttacaagaaaaactgaaggaagttcttcaggctgaaaggaaatgacactagatgatcacttgagttcacaggaggaagtgagaagaccagatataataaatatgagggcagatacaaatgactccatagaacttttatctcatcttctttaaatgacataagattgtataacaccgcatttttcagtttataacatatatagaagcaatatttatggttattacataaaagataaagaaaggaggacgatacttaagcaatgttaagaaaaagaaagaaaggggccgggtgcgatggctcacacttgtaattccagcactttgggaggccaaggcaggcggatcacttgaggtcaggagttcaagaccagcctggccaatatggtgaagccctatctctatgaaaaatacaaaaattagctgggcatggtggtgcacacctgtaatcccagcaactcaggaggctaagacaggagaatcacttgaacccaggaggcagaggttgcagtgagccgagattgtgccactgcgctcactccagcctggatgacagagggagactctgtctcaaagaaaagaaaaaaaagaaaagaaaagaaaaagaaagaggaaaggagtgaaatttctatatttcagtagaattgagttaaattactctaaaatggactgtgatataccccatcttccatgatgtggttattatatattacatgcctgtatcaaaacatctcatgtacccataaatatatacaccaactatgtatccacaaaaattaaaaatcaaaattaaataaaatagaatgtgataaattgaggtccatattgtaatctctagagcttaagataactttaaaaataataaaaaagtcaacagaagcattaaaatggcacactaaaagtaacacaaaagaaataacacaaaaggccgggtgcggtggctcacgcctgtaatcccagcactttgggaggccgaggcgggcggatcatgaggtcaggagatcgagaccatcctggctaacatggtgaaaccccgtctctactaaaaatacaaaaaaattggccaggcatggtggcaggtgcttctagtcccagctactcgggaggctgaggcaggagaatggcgtgaacctgggaggcggagcttgcagtgagctgagatcatgtcactgcactccagcctgggtgacagagtgagactctgtctcaaaaaaaaaaaaaaaaaaaaagaaataacacaaaagaaagcagtaaacgagggaaaaagtaacaaaaaagccatgatacaaatagcaaatagcaaaatggcatatgtaaatttaaccacatcaataatgacattaaataggaattgactaaatatcacattcaaaaggcaaggttattcagaatggataaaaaagcaagatccaactacatgctgtctactagaaacacaccttaaattcaaagacacaaatagattgaaagtaaaagcacagaaaaggccttacaatgcaaacagtaaccataaaagagctagagtagctacataaatatcagagaataaaggactttaagaaatattagcatagacaaagagagacatttggggatgataagaaggtcaatagtcaggaagatagaacaattataagtgtatatgactgtattagtctgttcaggctgtgataacaaaacaccataaagtgggtggcttgtaaacaacacaaatttatttctcagagttttggagcctgagaagtccaagatcaggatgccagcgaattcagtatcaggtgagggcttgccctctgcttcacagatggtaccttctgtgtcttcatatggtggaaggcaaacaagctcctttgagcctctcttataagggcactaatcccattcataaggggttcatcatcacgacctaattacctcccaaagacccaaccttctaacaccatcaccttgggggttgggatttcaacatacgaattttggccaagacacaaagattcaatccatagcatggacataacaacaaacccccaaaatacatgaagcaaaaactacaagtcagagttgaggttaaggttccatctatcacctgcgcacctaaagtcccagctttactgggggaccacagtggtgttctgaatctctaagaattagcatgaatttagagccagtatctagaaatccctcaaagatttgggcatttccttttccccactgcacagtcactcaattgaaagcaacaagtccccttggggaagcgttcaaggaagacttatgatatgtacttgcaaagctccagggtccttccctaaggagatccagtctccccttaaatcaagagactgaatttgtgaactgatttatgtctggaaactgggggaggaacttggttgctccaatgcagtgattcaagtcagtttttagctacatgacctagcatttttcaattatatagaccaggcgatacactagaaggctgcccgtctatcattcctaggaatgccatgtcagattcctcttactgaaacatcattactgtccttgtctttggcagttaagtgctgccacttaacttctgctactctgggatctcactagctctaatgagatcagggaactcctctaaatagcagcatcccccacgatcatatctggcctacaaaggaaagcagccacagaactttttaaggatgcagctgctcctctcactaatgtattccttgatatcttagtgatggaagtgtcttctgggccttcttgtgaaacataggtaagagttagggatgcaggacacaggtatcaaccccactccaactttcctatttgcctaagtctctgtattccctgctccacatgatgctgggtgttagggactaaactgtgccccccagaattcattatattgaagccccagcccccaatgtgattgtatttggagataggtcctttaaggaggtaattaaggttaaatgaggtcattacagtgggactttgatccaatatgactgatgtctttataagaagaggaagagacaccagggttgtgtacccagaggaaaggccaagtaaggacacatcaggaaggcagccgtctgaaagctgaggagagaagcctcaccagaaaccaaacctgctggcgccttgatcttaaacttccagcctgcagaactatgagaaaataaatttctgttctttaagccacacagtctgtggggttttgctgtggcaaccttagcaaactgatatacctgggaaacttctgctatcccaatctcattaaacacaggccactactgaggccaagctttaagcagtcaaccaagcaagctgttatagccaccgcagctgcattatctaacacattaaacccagaatctctataaggtgtgcacatatcaatgaatttataccaatttcaagtcatattgtcttcatttaaaatctaatcccacacttattccccaagactctgtcactatatattagtaaaatcttcctcttctttgtgtgtgtaagttatttcctcctggatcacagcatgcacctgtcctcctgtagcatgctgggttgggtccctagaatgcaacaggtggttgtgatgggtttaaaccacccacaaccccctgtgaggagaataaacatcccctttcaagccatctgcccaggtgaggttatcacaaacatttcaagaaaacgaaggctggtatcctcagacagaagggcatcctcagacataagggcaaactacatccattgggcaggaggcacagagtgacaagggtaacaagactgtcagtttcatctgggtcccacctgccatctctatctgagtttcagggtcccatcctttctcaattaatggcctaactttcaaataagaaatctggtgatcaggtgaatttaacagacattataagtccccaacatatacaatacaatttttgtttgattttcatcaatataaccctggagctacaagaagtatattattttgggctgtcataggagccctctggttcctgcaccatgacttaaaggtcctgagcttgtcgttttctttctgtgaatgctcccatggactcaggagaatacatcctccaccacagtttttgtagtcattgtcactgtcatagagtcaagtgcagcagttacttggccattcaagatacttgcttcaattggcacgtcatcacaatcagccacaggtgacagcctgattaactgtgatgccccctcatgctatggatcaccagtgtcccatttcccattggcaaggagctcggcactgttcccaagcaaaggacaagaccaaaccacttccaaaatcccatttcccagtttatttcctgggaccaatcccactaccaattctgtatcagtcagagtccaatcaggacatagaaaccacaactaatttgaacaggaaaagttcatataaatagttattaactggtatccagggattaactactaatgggtaaagcagattctacatatacagaaattccaaacatagggaggatcccctacctctgtggctgagacagagaaccgaaggaggatcaaatttggaagaggcacttactttgccccacatccaaggctgaaatcagacttcattgaattgagtgtggttgtcacccaccggatggcagagaagttcactgaggtgacacagatcagagccagcaaggaaaaagccgcccactgggatccaatgaaactcattaggaattcctcatctagggaactggcagaacatgttgggaagtcagatacagagatgtggctggaacttgctggaaagttgctactgggatgccccaaagactatctgggaagctggctggggtgccagtggaactgagaagcgtccatgggacaacactgaaattcacagggttcagcacaactgggtgtcctacaggttagctcacatggcaagagcaaagagacaggagagcacacacctctgcatctctttactgagactctctgagtcgtgggtctaagtaggatcctgcccctttgactcctagaagcccagctcagagcaggacacagtagtactcaataaatggttgttagcttaaattacaaagctgttatacattatagtctattgttgcactaatagaaatataactggggggcaatctaggtgttttaaagttcataatgttaaatatttataatcactgataacctttcctccctgtaaaaatgaagttagttgtgaaaatccctttccaggcaagtagaaaataattttggtatcgcaccaactagtataaacagagaaaaatcaaccaatgggacttgttcatattttgttttctgtatcgtcttctttcactaacacatttagtccagaatctctataagctgcaaacatatcaatgaatttggcccaatttggtgttatagtctgtttttatttaaaatcgactcccacccttattccctaagattctgccattatatattagcaaaatctttaaggagtttaaaatgtatcactgaagtaaattaaattaacttctacaaaaatattgagcaatatattagaaaaatattaaaacagccatttaatacctgaccccttgcttgaggcataactcgaatctaaaactctggacttggaactcactcaattagtgactttttcttagtaactatcttcttaaaaattgtaatttttcactcaatatcacagatccctttatttcattttcatccctttattccaagtccaaaaaaaatccccaaaatatcaagtgcttaaaagatgaacacattttggtgaaggttttaatttttagcaagccaagtatgttttttaactatctacaaaattagtagtgagatatcaattattatctatcctaaatcagccaaagcttttaaatttaaatatacagatcaatctatagattctttggacagaatgatgcatcttatggatatatagatatatagagacataaagtaattggtagttctctttatttatttctagaatatatttccttattatacccaggatatgagcagagctatcaaatgagtaggaaacatttatttatccatgcatgcctcattaaaacaataagattccaatcttttttaagcccgtgcttctggcaggccacacaaaagacacagcattgcaagtaagtttttccatgcttaagtaggagtgtgtaagagttcaatcagccagtaattcttcaacaagtatttatatgtgcagttcatgtgtaccaagcactgtgttactgctgcaaataaagatcagatcaaccaatgaaagatgtttttaagaattctgctgctcacctgagctccttctgggggtgggagacgacagccaaatatgggtgggacaggagagccacattcttgacagaagcgagcaaagggatctgatggccggggggcaaggcagtgggcacacctacaacaaaacaggttcccgattggccatgttctggtgggcccacattaagaagactgataaaaatctaaaagcggtcaaacagttttaaacacaaaacaaaagcagactgctctcaatggctatggaacaagttcaagacaggaaatacttatctaggtcatttggtcattttattggaatagtggccttgcaactggaccctctggtgccctttctgcgtaggccaagtccatataacttcttgatcatggcaagaagtttatcagcagccttggccccacttcttgctcgggctctggcttgtcctgtcacattggatttgatgtgtatgagggtgagccctgggaattccagcaatttttacattatgcttttctgactttctaccattgagcccagtctgagggacagggcttcttgcctgtgcctcaaacccatcctttctctttgcccacctttgcttagagtcctcaggccctgccccagcagcatctggccccatttcttatgcagctggacccatcgtttagctcccactcatctaaatgggttctggctatctgccaaagtgagagcattcttggaattaggctgccctaattcctttcctgctactgccatgcctttccagacaagttggctcctgatcctgtgacctattgatctgaacagctcctcagcaactagaaggcttggatactgtgcaccggattgtctcgttgcccacactagtctccacgttggagctgagctcattcccacactcttatcctatttagtccttcattactgtaccatggcaccaaggtttcaccatctctctggcatgggcccacccgccagagcaacaacagttccctcttttctatgcttaaagctcatgaagtgtaatctgactatctcattccactgatttgaattgaagacatagagctgggagtctcagaaggtcaaggtaactggagctttcaggaaagaataccagagaagagctgcagggagagtttcagaattttgcagagggtcaccctcaagtcttcacctgggtactactgatgagtgcatgtgatggaagaaaccactcaaggttagaaagtaaacaccaaagggtaacagagaaaacagtcttcaggattcacacagggctgcaaagctcatgcttacaccagccaaagtggaaaaaattcatatttaccgaggtatcagttagaatactctatatatactctaaatactccaattagaacataggagttgtcaggtatggttttttttaaaaagctaggcctaactatatgctgctcaaaagaaaccaactttatatttgtttgtttatttatttatttatttagagacggagtcttgctctgtcgcccagattggagtgcagtggcatgatctggactcactgcaagctccacctcccgggtccatgccattctcctgcctcagcctccagggtagctgggactacaggtgcctgccaccaagcccggctaatttttttttttttgtagttttagtagagatggggtttcactgtgttagccaagatgatctcgatctcctgacctcgtgatccgcccacctcggcctcccaaagtgctgggattacaggcgtgagccaccgcgcccggccagaaaccaactttaaatagagacataaatagattcaataaagggaggtacacacacatcaaaagaaagcaggagtgacaacattaacatcagaacaagtaggtttctgagcaaagaatattaacagagttaaagaagtttatttcataatgataaaagggtcaacttagcaagaggacaaaaaaatccaaaatgtttatgtacttaatagcagagtatcaaagtacatgaagaaaaactgatagaaatgaaatgcaagaataaataggcaaattcataattacagtcatatatttcaatactgctttttcaataactgattacatgataaacagaaaatcagtaaagatagagaagacttaaacaataccatcaactaactaaacctaattgatatttatagtacactcattctggcagaatacacattcttttaaagtgtacatagaacatttaccaatcaaatcatatatcttttctgaccaaaagtaaataaatttgacataagcaccaggccacgtgtactggctcatacctataatcccaacaatttgggagactaaggtgggaggatcacttgaggccaggagttcaagaccagcctgggcaactttgtgaaaaccccacccctgccacaaaaaaatatatatatacaaggttttttgttttgagacagagtcttcctctgtcgcacaggctgaagtgaagtggcatgatctcggctcactgcagcctccacctcctggcttcaagtgattattgtgcctcagcctcccgagtagctgggattgacaggcatgtgccaccatgcctaatttttttttggtatgtatatttttagcagagacggggttttgccatgttggccaggctagtctcaaactcctggcctcaagtgatcctcccacctcagcttcccaaagtgctggcattataggcatgggccaccacgcccagccaaaaaaaaaaaaaagaaaaaaagttttttaattagctgggtgtactggcacatgcctatagtcccagctacttaggaggctgaggcaggaggatgccttgaatccaggagtttgaggctgctgtgagctatgattgggcctctgcgcttcggcctgggtgacagagtgagaccctaagaaagaaagaagaaaggacgaaaggaaggaaggaaagaaggaagggagagagggtgggaaggcaggaaggaaagaaagaaggcagacaggcccaaaagatacaaggaaaatcctccagtatttggaaatataataaaacacttctaactaacccattgccctccctacaaaataacaaggataattagaaactgtttgaactgaatgaagatgaaaacacaacatatcaaaattcagagactgcaagtaaaacagtattcaggggaaatgtatagttctaaatgcctatgctagaaaagaagaaagacttcaaatcagtaacttcatattcccattaaagaaactaaaaaaagaacaaattaaacctaaaatgtactccaaaagaaagattaataaatataaatgtacttatatctattaaagaaatctaatgtgtagttaaaaatcttcctgaaaaaaaatcttcctgaaggaaaactccagatctaatcatttcacttgtgaatttctaccaaatatgtaaggaagaaataacaccaattttacataaactttttcagaaggtgaaggagtgaaaacacttcctaacttattctatgaatctagaattataccgatactaaaaccagacaaagacattaacaagaaaagaaaatcccccaacatcccttatgcaaatgctggcaaaaaaaattctttaaaaccttttagcaaatcaaattcaacattatataaaatagataacacttcaggtagatatatttcagggatgtaaggttgacttaacatttgaaaaccaatcattgtaattcaccacatgaacagaaaaagaaaaactaaattatcctctcaataaatagaaaaaatgctttggacaaaatccaacatctattcctgattttaaaaaagaagctctcagcaaattggaaacaggtaaaaatttcctcaacttggctgggtgtggtggctcacgcctataatcccactactttgggaggttgaggggagcagatcacctgaggtcagaagttctagactagcctggccaacatggtgaaacctcatctctacttaaaaaaatacaaaaattagccgggcatagtggcgcatgcctctgtcatccaggctggagtgcagtggcacaatcttggctcactgcaacctccgcctcccgggttcaagcgattctcctgcctcagctggagatcccaagtagctgggattacaggcgcccaccaccacgcacagctaattttttgtatttttagtagagatggggtttcaccatgttggccaggctggtcttgaactcctgacctcaggtgatccgcccacctcagcctcccaaagtgctgtgattacaggtgtgagccactgcacccggactataatgcatttttttaaaggccaaaagtttgaaaggacactttaccaaagaagatgcatggatggaaataagcacatgaaaagaggctcaacatcattagtcactagggaaacgcaaataaaaaccacaatgagatactgttacaatctcattagaatgatcaaaataaaaataaaagttagtaaggatacagagaattctcctccactgctggtgagaatgtaaaatggaacaatcactttggaaagcagattggcagtttcttaaaaaaatatatacctatcatattcctcttcaaggtatttgccccaagggaaatgaaaacgtgtatacataatgactttggggttttaaaaattattttattgtatctgttaatttttatcaatttatttatttatttagagaccagatatgagactggatcacttttgtatatacagtaacttttgtacaaatgttcacagcaactttatctgtaatagcccaaaattggatataacacaaattcccatcaataagtgaatggataaacaaactgtggtatatccatacaatggactgtagttcaacaataaaaagaaacggatgtttgttacaaggaacaacatagatgaatctgaaaatagttacgctgagtgaaagaagtccagcattaaagagcacacactaagtcacttcgttgacatattgaatcacatgcaagttaaactatagtgacaagaaagaaatcaataattgcctgtgatgagcgggggtaaaaggaaggggttaccaaatagggtacaatgtaggaaatttttggcagggatgaacttactcattttcttgattgtgacagtgtcatggttacatacatacatacatacatagtcaaatgaactctaaatacatatgcagttattgtatgtcaattatactttttaacaggctgtaaacatttaatttaaaaagttggggccgggtgtggtggctcacacctgtaatctcagcactttgggagaccgaggtgggcagatcacgaggtcaagagatcaagaccatcctggccaacatggtaaaaccccgtctctactaaaaacacaaaaattagctgggcgtggtggcgcgtgcctgtaatctcagctactcgggaggctgaggcaggagaatcgcttgaacccaggaggcggaggttgcagtgagccaaaactgcaccaccgcactccagccagggtgacagagtgagactccgtctcaaaaaaaaaaaaaaaaaaaagttggaggtgggcaaaaatgtcgtatctttaaattctctttgaccatgatgtatctttgtaggatttaaggcagagtaaagagaatgtgatacttacttgagaaagtctgtctccctttgaattctcattatctccgtgcttgtcaaacacttctgaccgcttacgtgtgcaaaaccgggggactaaaattaagaatataggtataaagacagagtcatatagtcaaaataacatggtaaaggctatggtatagtaaaattccattaaaaatcattatgggtgaatacacatagacatataaagaggaataatagacactatagactctaaaagtgggaagggtgggaaaaggcgagggctgaaaaattacctattgggtgcagtgttcactatttgggtgaagggtaccctagaagcccaaacctcaccattatacaatacatgtaacaaatctgcaccccctgaacccataaaaataaaaaattataaaaataaaaaatcattatgagtaatgtaattattactctagtatctaacatttctaaattatttaaagtgctattcacaatcatatatctatatttcattaaaaatgagagtttacaataaaagatacctgaatttaccatgagacagaccagattttaggatttaaaaactttagtatcccagcctggccaacatggcgaagccccatctctactaaaaatacaaaaaaaaattagctgggtgtggtggcgggtgcctgtaatcccagctactcgggaggctgaagcaggagaatcgcttgaacccaggaggtggaagttgtggtgagccaagattgcaccactgcactccagcctgggtgagagtgagactctgtctcaaaaaaaaaaaaaaaaaaagtaaaaataaataaataaactcggctgggcacagtggctcatgcctacaatcccagcaccttgggaggcagaggtgagcagatcacctgaggtcgggagttcgagaccagcctgaccaacatggagaaaccccgtctctactaaaaatacaaaattagcagggtgtggtggcgcatgcctataatcccagctactcaggaggctgaggcaggagaatcgcttgaacccgggaagcagaggttgtggtgagccaagatcatgccactgcactccagcctgggcaatagagtgaaactccgtctcaaataaataaataaataaataaataaataaataaacaaacaaacaaacaaacttcagtatctatttttctcaaaaactgtatctctaggaaactcaaaggtctgaacttaggactacaggctctatcctgcaggcaatagagagcagtcagaggtttctcattgcttttgtgccacatctaacatggcctaggctgggtgtagtggctcacatttgtaaccccaatactttgggaggctgaggcaggaggattgcttgaggccaggagttcaaaaatagtctgggcaacatagtgaatccccatctctacaaaaagaaaaacaaataaataaaaacataacatgacctagaccagaagtctcaaagtggtggtctattaggcaaatctggcctgccattgagttttatttggcattggctcccatagtgtttcaaaattttaactaacagtcaaaactttaaattatgttattacacataaagatgtagttttctgccttctcatgcaaattcattggatgtagcaacactgagccttcagtccctgggtgattctgatatgcaactgggtttggaaaccatgcttttctcctttatacttgatggtaagtgtgagcagccatgcaatcatgggcacacaaggagctgtggttacacagaaaatgtgactccaggtacattaaacttgggactcaaataggaggaacagaacaagggctcctgggttgcccttagatgccaaaagtccaaattggattttataaacattgaaaaaccaaagcactataatagtatagtaggcaactagtgtaagagcatctttcttgtgttatagtagtaagaatgcactgatatgccttttatttttatttttattttcatttttgagatagagtctcacgttgttgccaaggctagagtgcaatgacacaatcttggctcactgcaacctccgcctccccagttcaagcgattcttctgcctcagcctcccgagtagctgggactacaggtgcgcgccactatgcctggctaatttttgtattttcagtagagacggggtttcaccatattggccaggctggtctcgaactcctgacctcatgatctgcctgcctcagcctcccagtgtgttgggattacaggcgtgagccaccacgcccagccaatatgccttttattaaggtcataagtcacctctatcttgtcaaagccaatgtgaatttccaattgtctgtctttatctaattagaaccttcagtaacatatgacatagatgatcttctccttgaaattctttcatctcttggtttccatggcaacatattcttttggctttctttctactttcaggctcctcctcccctgctcaacctctaagttgaggactttcttcattttccttctcttcactttctgttcagccttgactagtgatctcgttcagacctaagcttcaaataccatcaacatattgaatatttccatatttctaagtacatatgtccagctctgacctctcccatatgtgaacttgcacatccaacaatctactcaacacctccacttggatgtctaatgtgcccttggacacctgctcgtctctcatcttttccagctttgtcaatggcaccatcatctccagatactcaggacaaaccctgagaggcagacttggctcctccccttccctctcatccgtcggatccctcagcaaagcccgcctcctatcctgaccacctctacaaccttggtccaagtcaccatcatttctcacctggaacaaaagcctcctaaataatgttctccctttcctcttccatggtctaatctccatactgtggccaaacagaaaacttttaaatgtaaatgggactgtgtcttgcctgccaaacagataccatttacaattagaatagaattcaaacttcttacggtcagactagtatctgtgactctcaaccatacctgaccgttagaatcatttaggggtggtttttttttttttttaacgatgctcaaaccccacatcagaccaattaaatcagaatttctgacgctaaaccttggggattggtttgaagctcttcaggtgattctaacgtgcagccatgattgagaaccacagctctagatactctggccccagccaccttctcactcatctcccaccttgctcatcaggcctgagaatgtgtgtttcaaataagttcccacgtgatgctgatgctgcaggtctggggatcgcctctgagaaccactgctctatctcattaccatgttatcttcttcatgacgcttaccaccattttaaattttctgtttatttacttaaaattatgtgtctgcccccaagcccaataaaaggtaagctccatgaatacagggacttttcttgtccagtacagtattcccagcactagaacagtgcctggcacatggtcaaaagtgggggaggtgcagtcttaaagtatttcatgggagcattaaaaatataggaggtatttgaataccctaaagattgtccttagaagttacctgggactggcgggtgggtggtctagaacctgatcctccaccataagctgggatttccaatggactctctgaaaagtgaagatctttcaaagttttagggtcagttctttcacctacctggacgtctacaatgatattaaaaacattattctttgagcatctgtaattatacataatcatacaaagatatcttcacagcgggagaccttttaataaagaaccactgtcaccacattgcttccctagaagtaacaattatataaagagctcccgccacacactcaatgcattagaagtgagaaagaaaaaacaagcccagactgagaagatcatcttccccgctgcattctacaatattccacttcaggctgggaaaacagacagatcaatccagttgcaaagttagcaggaaatattatatctcccaagagcacactgcagctgtaaatgtcgttagcagccccctctttgcatgccttgtctttcttactcactgagaaaccctgttctcttaaatcacagattatcagaaactttgctgtttgaaattctcagtaagaacgaaacattcaactcttgcctggggaatctaggccactctgacatagagaagcagcttcaatgtccaaccctggtgcagagataatcatttctgaacacagtgttccccatgtatctttgtagtttccaaggcaacagaaccctgggtccccttcctgatgctgataccctgggtccatacctgatgctgatcccttcacacccagaccagcttcgctttgagactatcaaaactctgctttcatttatatttcacccaaactccacccttcccccaaaccctacaactccagcatttcctctgtttggttagatgcccccatggctcccggcagtgggtcaagaaatctaacttggttggactgcttgatcctccttcatgatcttaagctgtaagcaaggacgtcattaaaattcaaagtacagcatactttcctgccccagtgtttcttattccaacacttctccagacaagaaaacatgcaacgaacatgccatgaacctcttcggtgggttcagaatacaaaaccttgtctttgttctgtcacatcatacctggaaactttctaaggttaacattccagctgcgttgattttcagagttcttatattttttctttagttttgatccaacaaatccatttttgaattcctaggaatgaagagattgcatatcaatcacttggttattcccatgtgagaattaaagctgcatgatagagaaagtgtcatggtgtgcatttcttatttgaaagagtttatggtcatttgtacaaagtgacccctgtttcactttattctggaaacatgcagctttgtatctggactgggctgctcagctggcagcacatctggatgtagccctcaccaggtgaagtggccaaggcaggaggcagggagcagcacatgcaggcaggatgttacaactgtgggagtctgggtaacaacagagggaccaccaagtccagagggcaaaggcagggtagagtcagaccaaaatcagacttctgcacaccacctgcccacacacagtccttaaacactcttctctctggactttctccatggacttggtccctcacacctgattcaagcctaagcacttgctgacatatgttggcttagcccccgaaggcggcccctgcccagtgtagatccttgccttgatcacacttgagtcccacccatgcctgcatctaccaacctcctctctagcatcaggttcatggtcaagcttaagtgaaacccctataaacttcctctgtcaatcccaacaacatccctgtgaccaagacctctgggttggccgccttactgtaggctagcccatcctctggcctaactccttgaatctttcttatcgatgctcacacccagtgcctgaagcgtcacacatccttctcagatggatctaattgactcttcacagtggggaggctttgcagatatttgggaataaagatttcaacataaaagaattctatgcccactgaggacttctacttaatgcatctattcagcaaatacacactcaccaccctctcctgcctgctcctgtgcaaggcaatgagtatggcaaccatgccaccttggagcttataatgcataggcaagataaacaaggaacaaagtaatcacatgctcaaagcagtttataaaagaaggcctgggtgccaggatagcagtgatagggcatagcaaacacactccagtttggttggagtatatgtagggggttgacagaccaggaaaagctgaccaagggcagaaactgatgacttggatggaaggctaaaggtttctggttttttcagtaggtaagagagagccactgaagacactggagcatggaccccaatgctcagcaggaactctcatcttcagggtggataggagactgacaaaaggctgagaaatcagtaaagatgctttgcaatggttgataatgacttcagttataaggacctgactgtgagcagaggtaaggtaataaaaggcaagatctgctcactgagaaagaaggaaccaaaatacagtgacaatctgaatggattatagtttcattacttgcctgccttgaagaatctttgagaacattttcaacattgtcttcaggagagactatatttggtggttcatagtctacgtgaaacacctttgtcacaatgccactctgtctgcagtctctgaaaattattattaagaaaggaaaaagtctgtgttacacaaagattttttaaaaagtggctaacaagatgattttattaaagtgccttagtctagctactaaatttattgtatttcaaattgaagaaatcaaatgtaatttctatagtctttcctgacctccttccttttgggctatttactgctatgtaacaaaccaccccaaaggtagtgccttaaaacatgaatctgtggattcacggtccccactgggtaggtctcatttgagctcttccatgtggctgccatcaaacatcagcaagggctggagtcaactgaaggctcaactgggctggatgttcaaaatgacttctctcaaatatgcaaagcctgggctggggtaactggaacagctaggggctcgccactcatcactctcactcaatctccatccctctgtccctccctctctctctcatgtggttagcttgggcttcctcacagtatggaagcctcaggtagtcagacttcctccatagtacctgactaccccaatcccctgccagtgtttttgtcccaagaaaccaaagcagaaactacaatacttcttgtgatctcagaagcccttggcatcatttctgaaacattctattggtcaaaagcaagtcacaacaccagcagaaaggttacaaaagggcataaattctgggaggcatagttcattgggggccatttttgaagactatctaccacattcatcataaagatatcagaccataagcctcaaactattctaaaacaaaaaatgtgttgcctaggtcattccacatgaatcaagagcattttccctgtctcagctgtagacagtgtaatatatgctgctctggtagattctgtaactcaaatactatcatgttttccattcattcataatatttcacaattcatcttgttctctgatgcagtaagagcttcataagaagacaatgtagccgtgcccatgactaaaaactagtggtgatgttatttcactaccagtagctcacctatactctattttttaacagctttattgaggtataatttacatgacataaaattcatctattttaagtttctggttcaacggaattcagtcaatgtaatgtacacaattttgtgagtatcaccacagtggaaatatttaggacatttccatcacccaaaagaattcccttgtgcctgtgtgcagtcactcctatccaacctcctaggcaaccactgatctgtttcctatctctatagttttgtcttttctagaaatttaacataaatgtaattatacatatgtggtcatcttacgtgtctggattttttatttatttgtttttttttggagactcatctatgttgttgtaactcgttcattgttattgttgagtagtattccattttatggatataccacaatttttatgtccattccccagctgatggtcatttggattatttctgggtttgggctattatgtataatgctgctatgaacattcatgtataagtctttatgtggacacgttttcatttctcttcaatagatactgaggagtggaattgttgggtcatatggcaggtatgtgtttaattttcagaaactgccaaactgtggctgttccattttacattcccaccagcagtagctgaggggtccagcttctccacatacttgctgacacttcatattgtcagccttgttgatgacctgtactcttgatcatgttctctgtaggtatttgcttgatacttgtcccttgtctatcaagatataggcttggtcgttgtaacacagaatcaaaacaatagtggctttatggcagggcacggtggctcactcctgtaatcccagcactttgggaggccaaggcaggcgaatcacttgaggccaggagttcacgaccagcctggccaacatagcaaaaccccatctctaccaaaagtacaaaaaattagctgggttgtggtggtgcacacctgtaatcccagctactcaggaggctgaggcacaagaattgcttgaacccacgaggcggaggttgcagtgacccaagatcacaccactacactccagtctgggtgacacagcgagaccctgtctcaaaaaacaaatgaacaaacaaacaaacaaacagaggcttaaacaagacagaagtaatagggtataagcagtctagagctaggtataggggtgtcatggtgacagaagcacgatagcaagtttctacttggttactccatcatttctatgacattgcgtttatcctcatggcccaacctgactggccaaccacatctacattccagccaattggaagcaaagcccaccctttctctttaaaggtacaatcttaaagttgaacacatcacttctacatgtatccactggccacagcctggtacacatctctaactagctgcaacggggattgggaaatatcttctaggcaaccatgtgcctggctaaaaatcatgggccctattattaaagggaaaaacagatattgggggacatccagcagcctctgccacatcatcatgaccacgcttggcgaatttatttgatgtgtttaactctcacccctcctcatacgcattgaaagctcacctttcctatgctgtcctttccatgtgattatggctcaaaagttaccgcagccagtgtttctatttgacctggccagactcttaatactttttatatttccaattatcttctttcttcagtgttctttgtctgctttgcccttactgattttcatatgatctttaatacacattgtctggctcattagcatttcttcagcaactgctcagatttcttacatgctcaacttttatatttcttaaaatttttgaaccttgaagcaaataagtatccctggatcttagggcggaagatttatgaatctttaaatctggttttgttgttttttttaaagaagagatttaaacagggaaatttagccacctatgagtcactccagccagtgaacatgcaagtgtcttctgatcacagaaagctgagatgttatttctaaatactgtcactcacagataggtagtggctatttagatgaattgtgtatttcttagaatttttttctccatcttcaagaaagttagcttaaaacttctatgttgtttaatgttaaacagattcataaatctggttacagatatagatgatcttttagatgaaccacttccttaacttattcgcctcagcatccatctcatctgtatgttcacctttggccccaggcctgtcattcaagatccaattgtccttcctgttaacacacacttcccaggcatcacaagcctctccatccagggatcacctgaatcttggatggtcttgatgctcccagaacgcacacttacaaccccacatgaggtcacatgagtagaggcctggctcatatccacctattctaccccctaagatccaggttgtttcccccaccccagctggcccttccttggggaaccagctaaggcattcaccttttgagttgaaaactcaaacgtttttaaataaatattttccctaagctgagcacatctgaaatactaacagtacctttcagaatagacacttagtggacacagagcagaatggtgagaggcataaagaatgaccttattttttactctctcttgaaagccttattaactccttcaaactgcatagtcagtcattaaattgcctcttcattttactactacttgcagcttctaaggaggcctgctttacagcatttggccaccagagtattgaggttcttaatttttaataattgagatgacttaccttgatagaagtggcctggcaagtgtgacaacattttataaagaataataacgtgcatatactccatttgcagcacacactttaaaacaataataatgtgcataaaggggttgttttgtttcattttatttgttataattttcagatgccaaggcaatcatgtttgctgtggaatgtgcagctctcctcaaaaagccatgcagtaattcagtcagtggggggtggggctagagtcctttaaagtacctgggccagccaggtactgcatttggtttggggcttttaaatgttcccaaaatgtggccaaacctgcattgctggaaaaataattcctatatcacagccacacagaattgcaaggatttgaggtttttttttgttttgttttgttttttgcctacaacacatggtgaaggttgccaaattaaatagtgtttctatatttgaaaatgggaaaaagtcattaagaaaaaaaaggataaagaaaaaagtatggtagctaatgtccaacaagttgaaatgacagtagctttgaaggccaattaagtcgatacaaaacgaaatcgagaatgacggcggtggttgtaggctgcatcctggggaataaaagagccactccgcgaacacagtattttcttcagagcaagatggagctctttagagacccccggccctggaaaggatcttccttcctgaaaccccaatgtggaatttaaaataaaaacagtattaatatacataacacttcactgagctgtatacttatgatttctgcaccttacggtatgcctcaatgaaaggcaagtaaaacacaaatgttacatacatatgctgaaattaaaataatgtttcagtagtgtccttctaatgcagcactgattctgataggaaaaaatgaataaaattagaacataatgttattatatcataaattaaattaatcaccatgctcttaacttacttagagacagcaatagctttaacttgtatttttccatcaggcagagtaataggttttatatacttaaatgtgttattttccccataaccaattctctttagaaattcaggtttgctgccatccagagtataatatatgttgacatctggagtgtctgaaaaatccaaaacaggataactataattaacaccaaagtagcaagtccctgaataatgcctataggtcagtttaagatctaagtgtgtgatttaagatttaaagttgtgatttaagttaagatttaaagttgtgacttaggacaggcatgtggctcacgcctgtaatcccagcactttgggaggccgaggcgggcggatcacgaggtcaggagttcgagaccatcctggctaacatggtgaaaccccatctctactaaaaatacaaaaaattagccgggcgtggtggcaggcgcctgtagtcccagctactcaggaggctgaggcaggaaaattgccagaaaccgggacgcagaacttgcagtgagctgagattgcgccactgcactccagcctgggcaacagagcgagactccgtctcaaaaaaaaaaaaaagttgtgatttaagattgtgttaatctccttaaataactgatctataggttattatatatacataatggaaatgaatagtaatagcaataatgcagttctttctctgtaccagcattgtgctttacttgaatgagctcatttcatctgtacaaccctatgaggtaggtcctattttacacccatcttatagatgagataactgagtcccagagagattaataaagttgctaaataatagaggagttgtgatttgacttctgctaggttggatacatagcccctgctcttgaaccactatgctcttttgcctctccaacagggcactgacacaaacatgattcaagattcaaaaggtcaaaaagggtatacagtgaaaagtctcccccaacccacgacaccagcttcccagaggttatcaatggtatcttcagtaaccttcaaaaatattttatatccatacaagcatctatgtacatattcttatttctccctctcttttgacacaaatgatggcatactgtaccctgttccacatatttcttttttcatttatcagtatgtcttatattggtacataaagagctccctaggaaataaatttaaatttttttaaaaaaagagcttcctcattatttgttatagctgcaccacattctcttatatagatgaacaataatttaaccaattccctacacatggatctttaggctgtcttcttttttccttttctttgtttcttttgcaattataagcactataataaataattttgtaaagaattatttctgtaaatatatgggcaagacaaatatgtagaactagttactgctgagtcaaaagatacatgcatttgtaatcttttttttttttttttgagacggagtttcactcctgtcatcctgactggagtgcagtggtgcgatcttagctcactgcaacctctgcctcccgagttcaagcgattctcctgcctgaacctcttgagtagctaggattacaagcacccaccaccacgcccagctaatttttgtatttttagtagagacggggttttgccatgttggccaaggtggtctcgaactcctgacctcaggtgatctgcccacctcagcctcccaaagtgctgggattacaggtgtgagccaccatgccctgccagcatttgtaatcttgattaatatttccaaactgccctccatggatggttaagcaatttacactgccaccagcaatgcatgaaaacacctatttgaccacaatcttcctcatctagtgtgttatccatttttcttttagttttcctaatttcctaggttaaaaaaaatactatcttgtagtttcaattcatctttcttgcattttgagtaaaactcactaattcattacaatgaatgtttgctgaatacctattatgtaccagacatcattctaggtataggggatatgcaaaagtatatcttaggggctccttgcatatcccctgtacctagaatggtccctgctctcatggagattatgttttaggaaggacactgaaacagtaaacaaccaaggaaatgtagtttgtcaggtggtgattaagtgcttggaggtgaagcagggataagttctgctcagcaagcagacgaaggggcagagagaagcgtaaggagaagaaatattttcatatgtttaagagacctttatatttcctttcctacaaaatgtcttttcattatttctcaaaagaagatatacaagtggccaacacacacatgaaaaaatgctcatcatcactaatcatcaaagagatgcaaatcaaaaccacagtgagacaccatctcacaccagtcagaatggcctttgttaaaaagtcaaaaactaacagatgttgcagagaaaagggacacttatacactattggcagggatgtaagttaattcagccactgtggaaagcagcttggaaatttctcaaagaaataagagttgaggccgggcgcggtggttcacatctgtaatcccagcactttgggaggcccaggcaggcagattaaaaatacaaaaattagctgggcatggtggcacacaactgtaatcccagctactccgaagactgaggcatgaaaatcacctgaacccaggaggcggaggttgcagtgacccaagattgcatcactgcactccagcctgggtgacaaagtaagactcggtcttaaaaaaaaaaaaaaaaaaaaaagaaagaaataagagttgaaataccattcaagctagcaatcccattactgggtatgtacccaaaggaaaataaattgttctaccaaaaggacacatgtacccatatgttccttacagcactattcataatagcaaagacatgaaaccaacctaggtgcccaccaatggtgaaatggacaaagaaaatgtggtacatacacaccatggaatactatgcagtgataaaaaagaatgaaatcatgtcctctgcagcaaatggatatagttggaggtcataatcctaagcgaattaacacaggaacagaaaacgaaataccacgtgttctcacttataaatgggagctaaacattaggtacaaatggacataaagatgggaacaatagacactggggactaccagagggtggggagggctgaaaacctacagcaatgcttgctacctgggttatggcctcaatcataccccaaacctcagcaccacacaatatacccaggtaggaaacctgcacatgtacccccaagcctaaaataaaagttgtaaaagaaaaaacaaaaaaaaggtcttttcatatcctttgcccatttttcttctgggttactgttctttttgttactgaattgtgaaaactatttatttatttgatatttacatattagggaattttgataccctaccattcatatcatcttttgtcaatagtcacccaacttctcctaagaattatgggcacatacattaaaatgtttaatttggtttgacagtttaaaaaattgtatcagcttttaagctaaaggagaacacagataataatacatatgcttagttagaactcttggtctaagcagcacaggggtcataacataaatgcagatagtttgtacacatttcagttattaaaatatataattggttaaaaaaaggcaaaaattggaatttcaaagtcttttttacacatctatttgttcatatgttttacctgtgaaactttccttccttatgttaattatatatgtgtatgtatatatatgtgtatgtgtagatatacacacatatttaagattttgaagaatacgtattagcaggatatacattcactgctttatttcttttttctttttcttttttttttttgagatggagtcttgttctgtctcccaggctggagtacagtggcgccatctcggctcactgcaacctccgcctcctggcttcaagcaattctcctgcctcagcctcccgagtagctgggattacaggcattggccaccatgcctggctaatcttgtatttttagtagagacaggaggctggtctcaagctcctgacctcaggtgatccacctgcctcagcctcccaaagtgctgggattacaggcgtgagccaccaggcctggccctcactgctttatttctgtagttagagttgagatttattttcacattactatatgccaaaccctgtgcacctcatacatacacgaacctatttatcctcacaatggctctaagaagtagatattattattcctgtcttacagtgaggtaacagactcaaaaaggctaagtaatgtacccaaggtcactagaagttgtcaaggcagggattaagtctccaacctgtctgactggaaagcctgtatcagtaggtcaaatttattataccagctaaataatgagcatattggaaaagtttggggagcaccgggacttttttttttttttttttttttttttgagacggagtcttgctctgttgcctaggctggagtgcactggcgcgatctcggctcactgcaacctccatcacccaggttcaagcaattctcctgcctcaacctcctgagttgctaggattacaggtgcccaccaccatgtctggctaatttttgtatttttagtaagacagagttttgccatgttggccaggctggtcttgaactcctgacctcaagtgatccacctgcctcggcctgccaaagttctgggattactggtgtgaaccaccgcacccggccagcaccgggacatcttaccttggctaaggtaagtcaagacattgctgaaactatacaaatgaaaggttggtcaaagctaaccattttaatctaaatgtataccactctataaaccatcaatgtacagcactgtttcaaattttagaagttttacaaatttcccaaaaagctgagcaaagagtgagaaagcaggcaaagagataaaccagcaaccagataacacaagaaatatgacaatgttattttaaacaatttcaaacatatgtgattcttacctgatttcatttccaaaagcgtattgttatcaatttcatggttagcttttccaggctgaggcactcgtaatggtatgatctgagggacacacactgaaccagcagtcattttctctctctctctctctctctatatatatatacatataaattccaatgtacacaaaagctgaagagcagcacttaatttaaatgcagcaaaactagttaaaacgagagaatactgttaacatggcactacaaatattattccctttttaattgaaataataattacatttcatctgtatttgctgttgaggtcttgtgtggggttttgattatctaaatacctcacttctgcgaaaggagcatgaatgaatgagatggggaaaagaaagaagttactttaaaaggacaaattaaatgagtaaggcaaaacagagactatcactaacgctctgacttgagttccctgtaaatcattatcgccttttcctgcctctggtgtgtgtcagctctcttggcttcagggcaagtcatcatacaaggggaacagaagtaattctgtgtgtaccacaaaatgttagttagagctaacttttttgggaaagctccgggttcacagccttgccattatcaccagagcagttctagtatttgaaagctgcaaagacactttagaaggactgcagagtactacttctcagtggaaaggaagtttgcaagaatataaacagtgaccaataaacacaagcctcccgtttcatctactgtatttataaatcctggtattaataattaactaccagtatgaaagccttactggtctttttggaggtgagggtggggaggaaggttgtcataattaatgcacagaaggtttcagggggaaaaaacgctcaccttaacacaacaaccatttacatctctgtattgccttttcaaatttcattaataatccatagattttgcccaattataatctacatattcattccatttttatagtctacttcttgcattctcactgtattatttagttttccctgtacttatttatccatttgtggctgggcatttaggctatttctagtttctttttagttttgcctgttgcagttctaataatgctgatctgaacatgtctgcagtttgagctttgtcacagactgtattctcaaaaatggggtacctaaatttaaggggtgaacttaatgccttgttggatagttccggatctagggccaagaatataaactacagatactgacagcacaacaatagctcctacgggagtgtggctggacttgagacttgcccatagtcgcatttccatttaagtgaaaggcagataaaataaaagtagttgaaaaattctaaataaaaaatatgtaggagaggaagtaattcgcgagcgtcaactagcagctgcccttaggaagctggggtggccagtgggccccacgcaaagggaatcaagaaaaaaggcggatccgccaggcccaaatggcaacgtgcagtcaacaggatccccagacccctcaactctcccaacgtggaccgccccctcgcagcccggatccggaatcccgtttggttgttcccgcccatcaggggctgccaaggacacctgcatcctttcggctggagtaagggaagctcttcccctcctctagccgccctcctcttcctctaaccgcggggcccgggatcgggacccctaatgcatctctgccgcgcccaacccagtcgccagcctctcaccgcctcttgcctcctccttcgccgccgcccgggttaccacagacgcggcgagccgcgccccgcccactgggtgctgggcagatgattggtggagactcagcttcttagcaactagaccggcccctgccgctccgcagggagcctggtacccgcctggagttcctttcccagtgctttcccataggcatctaagaatattccttcacagagttgccaagtgctaaaagttggtttcccaactcagaatgaaggaaccaggcttgtgcgtccgatgggcattgacattctggaaaacaagaataagaagctgtagcggcgcctgtaagtgggccggagcaggcgcagcttggccacctcccgccgaaaggcaaggaaggaccggctgcgacacgaggaagaaggcccctcggcctcagcagagcgctatcctccactggttccccgggttccccggcttgctaccgggctgctccgtgcatctttccccccaggcgtcaggaactgcgccctcatggcggaggtgaaggtgaaggtgcagccgcctgacgcggatccggtcgaaatagaaaacaggtaaaccagtgaggctccggcttggcactccatcaggcgcccagtcatttgggcagctggaccccttctccgggatcccttgggagtggccggagcgggttaggtgagcacgcgggaaaaacgattgcggggttctggacccacttgttccttcccatcctgggagagcagaactcaagaagttcaaaatgggtttgacagcttgcaactttgtgtagctggctggctttgccctgatacttttggggaagttgtgatgacgtgctgccttcctactttgacgcgatcagtgctttgagaggagccctcggctttctttccctgtagaacacttgtgaatacatgttctgatccaggatcgctcttgtcactaagggaacgtctatgacaaaacgtttaggcggagttagggcgcagttggtgattacgaagtaacattaagccaggtggtttcagtgcagtattgaactcaagacttttaggacacccaaagcctctgccacttttatttttatttgtttgtttgtgagacagagtctcgctctgtcgccaggctggagtgcagtggcgcgatctcggttcactgcaatctccgcctcccgggttcaagcgattcccctgccttagcctcccgagtagctgggactacaggctcgcgccaccacgcccagctaattttttatgttttagtagagacggggtttcaccatgttgtctgggatggtctcgatctcctgacctcgtgatccgcccgcctcggcctcccaaagtgctgggattacaggcgtgagccaccgcgcccggcccagttttatattttaccgaggcactgccactcttagattttcacgtagttttaaaagactcaactttctcagactgttaggaataatacatttgttgatgtcgactaggtgaagattttgactttttttgtttggtaggtataattccaaaaacaggccccattatggtgaattgtcataacaaattttggcttcctaccagaaacatctgcatttgcctcctgcttgcagatttatggcttaactttgtcatgcttattacacccgagaaaactgaagtctcagctttaatattttttctgtgatttcattagacttttgctctaatttaaagttcttattagtgaggaaaagaaatattcttaaataacaataatactgtaaacatgtatttagaaatcatcttcttcaatttctaacatgctttgatccaaaaccatcacagaaacccagattgtctgccaaatgtgaaaaaggcacagtttcaaactattctacttgtatttttacccccactgtctcttgaaacaggtaaccatgaaggataacattaatacctttgtttctaggattatagaattatgtcaccagttccctcatggaatcacagaccaagtaattcagaatgaaatgcctcatatagaagcccagcagcgggcagtagccatcaataggttgttgtctatggtaaggtgaatctaactattttgcataattactgatatgctgattatcactggtttttattatgtagttgtgatggttaatttcatgtcaacttgactaagatacaggattcctacatatctagttaaatattttattggagtgtctgtgtgggtgtttctgaaagaggttagcattttgaattggtgaacggagtaaagtagatatgggtccagttgggtgagcatcatccaatccattcagggcctaaatagaacaaagtggcagaggaagattgaattcactctttgaattcaatcttgagctgggctatgaatcttgtgccctcagcactcctggttctcagaccttcagacttggactggtatctacaccatcagctctctgctctcagccctttgatctgcaacaccagctttcctgggtctccagcttgcagagggcagatgatgggactcctcagcctccataatcacagagcaaatagcttctgatgaatctttcaagagggaggtgtatcctattggttctttttctctggagaaccctaatacagcagtcataaaacgagaaagtgtgttaggtttgactgataagactctaaaccaggaaacagctcaaactacctgaattgaaaaaagaagaaataattatgcgttataagacaaatgaaataaatgtattatggtataactgttgtatttattaattgccactgccatacataggtctagtctgttctcaccttctgtttgcttcctactgctggtgttgggccatttcccataaaatattccaccccccgattttcctatgagttgtcacagagcccagtcatcagggtttcattctccacattgtcactctgagcatttcaggaagcaagaatgagtccagttgaatgaagaatgttgggctttggggaggaagtgcagccttagcccccagtgacattgcaatggaatttatcagtgaagccattctccatctgtccagaaacaaacaagcaagactgtctaaaaacccaccaagtggtgccgatgctctaaatctcccttactttccctcatcaccaaaacatccttttcctaagagcatttcagtttggctttagtagcagttaggttaaagagttctacgccaaggcctcatctgaatgactgatttgttttttaagtctactagccttgttggatttccaagggctctggatgtggagatttggggtccgatgaatcttttcttaaacctttcccatcaattttctagctcaggagttggcaaactttttctataaagtgccagacagtatatgttttaggctttgtgagccatatgatttctgtcacaactacactgtcattttagcaagaagcagccatggatgatgatacataaacaaatggctacagccatgttccaacaaaactttggttataaaaacaagctgtggagcagattgctcacccctgttctagcccaaggacaaaggaatgttgctgatttctagttatttcactgtggtgaaggtcttcagctctaggaaagacagaggaagggattctgggaggttgtagcagtggaaaaagttcttttcttcctctgatcgccctctcagctctttccttctgactgaaaatcatcttcagcacctctcttttaccacctctgccaccacccacccactgcgagtcctattggctataggttgtatgcaggcagtagtagagctatcaaaggatattaagaaagggagtgattattaataaatcatgtaatgtttctgattttagctcttaaaaacagttcttaaatttgctgtccacaccccctccatttctatccctggtactgcatcatgttcaggctcatggcttttacctggacagctgcagtagcatcttaactggtttccatgactccatctgtctcagagaagccagcctgatttgggattacagtcatgagccaccgagcctggcccctgatctgtcttaaatgcaggtctgaccaaggcactctaccacctacaatttgtttatactggagattcaagttcaaactcctgggtttcccacactgagtccctgcattgttcaccagcctcatctccaccactctacttcaaaagttaggtttcaggaggagcagattgtttttggtttctggccacatcatgctgtttcgtgccacaggactcatgttgttcccctgcttagaaggttcttcttattctttacagatgactaacgcattaggactcaactctgccattgtctccaggaagtcactgaacccccccaggttgggccgcagcctgttctccgagtacccaatctgggagttcagggtggctttacttacctctatcttaatgccaaccagatgggtattgaagtcacctgtgtgtttcccttttagaattaatgttgttcccccaaacacctatcataacacctggcacagtacaagtattcagtaaatattcataagctggataaatgaccagagcctctggattgggccttgtagtcctactttgccacttcgtggggtcagggaacaggagtgtgtcactgttcattcagtatgtaaatccatttccaagtcatgagtgtctgttttaaaacaagggaatgggctgggcacagtggctcctgccagtaatcccagcactttgggaggccgaggtaggcggatcactagaggccaggagttcaagatcagcctggccaacatggcctaaccctatctctactaaaatacaaatatcagcgtggcatggtggcatacacctgtaatgctagctacttgggaggctgaggcacgagaatcgcatgaacccgggaggcagaggttgcagtgagccgagattgtgccacggcacaccagcctgggtgacagagtgagactctgtctctaaataaatacataaataaacaagggaatagcgtccctctcaactgtggctttctagtacttccagagcctagtggtataattatctgggttctcttaagttcggacccaaggaaattcaggagcatgacagacatactttattttacttttgatttgctatataaaaacaatactactctagtccttttattcattggctgacttcagtaaatgtcactgttaactttttttgttttttgttttgtttgttttttgcttttcaagatggagtcttgctctgttgcccaggctggagtgcagtggtgcgatctcagctcagccttccatgtagccgggactacaggcgcatgccactgcacctggctaatttttgtatttttagtagagacaggttttcgccatgttagccaggctggtctcaaactcttgacctcaaatggaccacctgccttgacctcccaaagtgctgagattacaggtgtgagccaccacgcccagccattaactttataaattttatttttcactgtgcaacagaatatgcctatttagtctttatttcaactttttatttatataaattatatttttattttatatatgtaatttggatttatattgatttttaatatagattgttattctcaagctgctttttaaaaattctttatgcattgatcatataaccaagccaagatctagcctacaggaaattgttagtgatattttgaaaaattttgagattaaagagcaggttttgaaaaattaagaatgttaaagaatgcatcaacatttgtcatttgatttaacatatctccaaaataactgactcctgttttctactgtcttaaaaactagggtcagttggatctcttaaggagcaatacgggccttttatatagaataaaggactctcagaatgctgggtaagtacttgtttttttaattttaagaaaatgtttattatttgcaaacgtatgtgttgggaataaagctaatacaaaattacataaacctgtcctgtgtatcatccctgcctcctatgatatattccatttcccagaggtaactgctcttaataatttagtgtatatcctttcttctagctatatataaatacacatagatgattatatatttatatataatctttctcttttttttttaacaaaaatggaatcatgctatccattctgttttgcaatttgtttttttcacttactgtatcttggacatcttttcatgttggtacacacagctctgtctcattctatttaaggtaagcctttcttttggtaaatatgtcactgtggtgaccttgtctgctaattttgtttaagtagtgatgtagattattagattatcctatagtccttaccttactaattttactttattccactacagtaaaatgaagggatccgataaccaagaaaaactagtatatcaaatcatagaggatgcaggaaataaaggtaagcatgtgaaagatgaagcagaaaaaaacattgtctttggaactagatatagggacccagatctcagcttcccagggtagaactcagtggacagagtatactgaggaaggtaatagaacatacaaatataacatgcatgtgcttgaaggacacccaagagtaaggccgttgttgccttgaaagagacaagaactaaagggctgtgtccagggatggaaaaagacgtctgaattctgagtcacatgaatgtattatctattcaaaataaataaaatttaagttttttttttaaatctgtaccttctagctatatgaccatggacaagttacttaaactttgtgagcttcagtttctttatcttatctataaattgtggatgctgacacctctcgtttttgcaaggaccaaaaggaaagctggtgtggtgtagcagtgtcttaacagatgtccctccgcagctatagtttctcttctacccgcttgaagaactgtatctaaattgcaatcctaagttacaataatttgggatctatttgagtcattgatattagctggaaaaattgagatgtaatctgaaattacataactaattcttatatttattaaaattaacatttttaaaaatagtcctatgagaaagccattctgcatatttttttaatcttcctatctcatatgccattacattgggaagaaaataaagcaaaatatttacatacattccctttccatatataacacttatttccttctttgaaaaagaaatcattgcttctcacacagggcttttagcagccataagaaccctaggcttccttttccatctcacaaatacaatgttgtataaataatggattacatgcatgcagacactcatctaaagagtgtttttgtcccacttgaggatggcagttgaccttgacccaaatttaagtttgtatttcacatttacaatctaaaatgaaagtatcagaaaacagagataagggtacagatgataaaattccattgcatccatgatttttccttccattataaaaacgtcgttttcataattttttttttcttttttttgagatggagtcttgctctgttgcccaggctggagtgcaatggtgtgatctcggctcagtgcaacctccgcctcccgggttcaaacgagtctcatgcctcagcctcccgagtagctaggactacaggtgcatgccatcaggcccggctaattatttttgtatttttagtagggacagagtttcaccatgttggccaggctggtctcaaactcctgagctcaggtgacccacctgcctcggcctccctaagtgctgggattacaggcatgagccaccatgcccagccctttccataagttttttaaaagtttgccacactgggattccaagaaatttctagttagaaattataaatcattataataagtcttacaaagcattatacttatttattgtttagcatacttttgctactttagccagcattctttactgttagctttatactgctagctttggaatgagacacaagttagaggaataacattaaaaatccatgaaaaccagagttcaacttattttactttactttcttataggaatatggagcagagatatccgctataaaagtaatttgccattaacagaaatcaacaaaattctgaagaatctggaaagtaaaaagcttatcaaagctgttaagtctgtagcagtgagtagtcctttcctcagatacccacttacatatgttgcttcaagtttttattcttgaagttatgtcatgatttagaacagctggtcaaaaaagacttaaaaatttagctcatgttggattggtttggagatgctgcttagacttgtccctacacagttagctcttggtgtctcactcacccactcaaaaatctaaaactactttactgtcttcagtgaagaatctttggaactgtgaacatttttcctagattttgtggtgtgtaagataatttactttatcccgacatattagctttctcattcaacaaagagtgtttgctgtgtgccagacactgttttgagtgcttgggatacattaatgaacaagtcgtagaaagatccctgccttggtggagcttctcttctagtacacgtgtgtttttcctgctcctcatcctgccccacccctgctccagagctggctccctcggggacatctgcccctgacctcactgatttagacatcagaggaactgagattcccctagaataaagtttgcttcaatacacatttcataagaattacagctataattcaaattttataatttcagagctgttaggtctgtggcagtgagtagacctttcctcaaatatccgcttacatatgttgcttcaagtttttatttttgaataaaacaagaattataagaattataacatcacttataagaatttgatgcttattagtgattttatttatcagaatagcatttcccttccacattgtttaatggataatttcaaatatatacaaaggtagaaaaaatcatataataaaaccctatcatgtagcctcattttgtcagtcctccttctacatctttatgtttaataacagctctgctgaaatataattcatcattcatactacagaattcattcaaccttttaaagtgtaaaatctttggatttacagtcactggtttttactataagctaagagttgtgcaaccatcaccgctgttctaattttagaacattttcatcacccccaaatgtggccactagtatttgtttcccagcctctctttccataggccctaaaaacgaataatttattttctgcctttattatagatttgcctattctggacagttcctataaatggaataatagaatatgtagtcttttatgtatgactactttgacttagcatgatgttttcaagatttatccatattgtgctttattccttcttattgccaattaaaattccattgtatagatgtatatcaccttttgttcattcatccgttggtgaacttctgtgtccttttaagggttaaaataatcttagatctcagtgtaaagtgcaaaactataaaactttttgaagaaaacatagaaaatctacatgaccttggctttgttaatgaattcttggactataactccaatagtagtctatgaaagaaaatgttaataagttggagtttatcaaaattttttgaaaacctctgctttgcaagacacattaagagaatgaaaagacaagttacatactaaaagatatttgcaaatcacatatttgataaaggacttgtctccaaaatatacaaagaactcctaaaattcagcaataagaaaacaacactttgggaggccaaggcgggtggatcacctgaggtcaggagttcaagtctagcctcaccaacatggtgaaaccctgtctctactaaaaatacaaaattatccaggcgtggtggcacatgtctgtaatcccagctacttgggaggctgaggcaggagaattgcttgaacccaggaggcagaggttgcagtgagcaagattgcaccattgtactccagcctgggcaacaaaagcgaaactccatctcaaaaaaagaaaaaaaaaaaaaaacacacaatgaaaacaaataatccaactaaaaatgagcaaaagatctgaacctcaccaaagaagacatacagatggcagataagcatatgaaaagatgctctacattatttttcattagagaactgcaaattaaaataaaatttagtatagtgagataccactacacacctattagaatagctaaaatctaaaaattggtaataccatatgctgacaagatacagaccaagatgaacactcatacattgctaagaatgcaaaattttcagtccttttgttaaaaaactgggcagtttttacaaaactaaacagagtcttaccacattgtccaaaggtcaagctcttaagtatttacccaactgatttgaaaactcatgtccacataactacatgaatatttatagcagctttattcgtaatcagcagctttattcataatcaaaaactggaagcaaccaaggtatccttcaataggtgaatggatagacaaaccagaatagtattcagttataaaaagaaataagctatcatgaaaagatatgagtaaatcttaaatgcatattgctaagtaaaagaagccagtccgaaaaggctacatactgtatgattacaactatatgacatactggaaaaggcaaaactagacagactaaaaagatcggggtgagggcagggatggtagggaaagttgaataggtgaagcatgagaaatatttctagggtggtgaaattattttgtatgacagaagcattaaccaaatttggaagcccacccaagctttgctgtccaaagtttttattagggtttcattatacaggcatgattgattgaatccttggtcatgtgagtgaattcaatctccagctcctctcttctcccaagagattggactgatgtcatgtggcccaaagccccaaccctctaatcatgcggttggtctttccagcatggacaactcctatcctgaaactatttagagtcctatcaggagtcaccttgttagcataaacccaggtgtgatctaagggattcaccatgaataacaaggcctattgggaaattccaaagatgtagaagttatttcctaggaaaaagggacaaagtctagccaaatttttttctttttttttttttttgagacatggtctggctctgtcacccagactggagtgcagtggcacaatcacagctcactgcagcatcaacctcctgggctcaagccatcctcccaccacagccttccaagtagctgggactataggcacgtgccaccatgctcagctaatttttgtatttttgtagagacagggttttactatgttacccaggcctgtcttgaactcctagacttaaagatctgcccacctcagcctcccaaagtgctgggattacaggcataagccaccatgcctggcccaaattcttcatgtttacaacccagtgaaatttgggttcctcagtgttggggtgagtagttacagacaaacaaggaaagttagaatgatccatgtagtaatggattagacttgaaaacatcagtatggactcttgtgtaatttaatataaataatatagatggttatatttagaaatattgagtatagctatgtatatatacaagggttaatatgcgcacataaatctcgtgctgccaactgagaaggcctagaagtgatgacatcccgatggcaatgaacacatctagtgcccaagtcgtggtttctatcatgcaataaaatgaacatgtagaaaatgctcctgacggctgggcagggtggttcatgcctgtaatcccagcactttgggaggccaaggagggtggatcacctgaggtcaggaattagagaccagcttggccaacatggtgaaaccccatctctactgaaaatacaaaaaaattagctgggcatagtgacgggcgcctgtaatcccagctactcgggaggctgagacaggagaatcgcttgaacctgggaggtggaggttgcagtaagctgagatcgtgtgccattgcactccagcctggcaacaagagcgaaactccgtttcaaaaaaaaaaagaaaagaaaatgctcttgacatcttgtagtgctagaaagtaagaaagtgctacaatagctggacacgggggctcatgcctgtaatcccagcactttgggaggctgaggcgggaggatcacgaggtcaagagatcgagaccatcctggccaacatggtgacacccccgtctctgctaaaaatacaaaaattagctgggcatggtggcacatgcctgtagccccagctactcgggaggctgaggcaggagaatcacttgaacccaagaggcagaggttgcagtgaaccaagattgcaccagtgcacgccagcctgggcgacagtgcaagaccctgtctccaaaagaaaaaaaaaagtgctaaaatacacacacacacgatgggagcatagcaaagggatacaggaaccaagtgaaaagcttccaatgcccaaagcattccaaagcttccagtgtgggaataacaatgaagtatctgaatgtaaatcaaagtataaaataaatactcatgagtccatagtgatagaaatacggtgtttgagaaactgtcacaactaaaagaagcctgagagagatgactaaatgtagtatgatgtcctggatggaatcctggagcagaaaaggaacattaggactaatgaaatctgaataaagtatggcatttagttagtaatgatttatcaatattagttcattaattgtgacaagtgtaccacactaatccaagatgttaaaaataggggaaacagcatgatgtatataggagctctgtgtactatctttgcaataattttgtacatcttaaactgttccaaaatataggtgtttttgtttttggaaattgttatcttataaacacatgaactgtgcatgttctttcctaggcctcaaaaaagaaggtgtatatgctctataacctgcagccagaccggtctgtgactggtggagcctggtacagtgaccaggattttgaatctgaatttgtagaggtgcttaaccaacagtgttttaaattcctacagtccaaggtgaggtatgattgaggaaacatcactgcaaaccctcttgtaaaaagtttttcacaaaggattttaatctatttatcatattttataggaattaaaaacctgaaattgggaatttttacttaactaaatatgttctgttgttggtttgactcagtataaagtgtattcagaaaacacaccaatattcttatttacatttcttatgtttcaatccttataggcagaaacagcacgagaaagcaaacagaacccaatgatacaaagaaatagttcatttgcctcatcacatgaagtgtggaaatatatctgcgaattgggaatcagtaaggtcagaactgaatttcatcttattttttaaaacttattctttgtcacatacaatgtattccaaacatgtatttgacccacattgttttttttttttgagatgatagctacgaacattctgcagaatccactttgggaaaatactgtcctgtatcttaggcaaaggcagtcactgccattgggcattgtctgaactgatactcagcttgggacactgatgctttttttatttttttggaggtagggtctcattttgttgcccaggctggttttgaacttctggactcaagtgatcctcctgcgttggcctcccaaagtgccactgtaccctagccttttgaaattctttttttaaggacactgatgcttttcacagtgaagaaatcaaagtggccattttggacatgtcactttaatttcctgggcctcagatttctcataaaaactaggaacttggactatttgatgtctaaagtgcctttctgctcaagcattttataaatctccaataaattcctgctaaagaaatgttattttttataagatttctcgattttacttaggaagtaaagataccagaaagtgtcaaactcagcatgagcttagagttctgtccctggcacctcagtggtttgtgctaacttggcctattgttcctcctctttgtgctttaaattactccaccccagcataatgtttctcccatttcacagcagaattatgaccctttactgttttatttatttatttgagatggagtttggctcttgttgcccaggctggagtacagtagtgcgatctcagctcactgcaacttccgtctcccgggttcaagccattctcctgcctcagcctcccgagtaggtgggattacaagtgcctgccaccatacccagctaattgtatttttagtagagacagggttttgccatgttggccaggctggtctcgaactcctgacctcaagtgatccacctgcctcggcttcccaaagtgctgggattacaggcgtgagccactgcgcccagcaaccctttactgtttttaacaccctccaagtggatgtctccctatcctacttgtgtcctttctgatgtatcccttttttaggtagagttatccatggaagacattgaaaccatcctgaatacactcatttatgatggaaaagtggagatgacgattattgctgcaaaagaaggcacagttggcagtgtagatggacacatgaaactgtacagggcagtcaatccaatcatccctcccacaggtttggtccgggcaccctgtggactctgcccggtgagttaaagtggcttcactttacacttgactgcccacgggtgcaagtgccacattaagaaacagagcaagcacagcccagttttctcagactcttagggttgaccaagagctattcaaacctccatgaaaccttgatgaacagacctttaatgaacacatcattcctttacttttttttttttttttttttttgagacggagtctcactctatcaccgaggctggagtgcagtggcacaatcttgactcattgcaacctccaactcccgggttcaagcagctctcctgcctcagccacctgagtacctgagattataggcacccaccaccatgcccagctaattttttttatttttagtggagacggggtttcaccatgttggccaggctggtctcgaactcctgacctcaggtgatcccctcagcctcccaaagtgctgagattacaggcatgtgcccctgtacctggccccctgctttacattctttcttggaacaaccacattaaggatatttacgttttctgctcttggccttgaaatggacactttttgatgagggctaatcatttcacctaaatagggcagaaaatgagatttgttgagaacctaccttgggccagatatgtccttgatgatttccataggcggtctcatttaatcctccttacattcttgaagctagtggtgttatttccccttaaaagtgagggagcttaggcttaggaagacataggggcatacagcttagaagtaaccgggattcaaacccagagatcatgtctttcccctgcagcatgccccagcactcctccttcattcattcccaaatattgtaagtgccaactctatgctctaggcactaaggatacaagagaaagcaagagacactgtcccagtcctcatggcatttatagatgagcctgtgtgtgttttatttcattataccaacctttgtctatatgcctaagctctctatgccttggtttcagtccctagacaaaaggctaacatattaggaattctgttttgcacccttcacaaaaaggtagctaaacatgaaacatttggttaatcaaaattaagtcattcatatgtataggtctccctgcccatattcctgtgttacctggtgatagccttttgcccagcagacaggtgagcatggtcatcttaatgccacagtaaaaaaagcctctctactactcctaacttgatgatcacaaagcaggccctattatagtatgttcttcccgctcccccctcgccccccgagatggagtcttgctgtcgcccaggctggagtgcagtggcacgatcttggctcactacaacctctgcctcccaggttcaagcaattctcctgcctcagcctcccgagtagctgggattacaggtgcctgccaccacgctcagctaatttttgtattcttagtagagacggggtttcaccatgttagccaggatggtcttgaccacccacctcggcctcccaaagtgctgggattacaggtgtgagccactgcgtccggctataatatgttcttaagtacagtcctagtccctttcagtttgaaagttttgtttttaatcttgctttaaataagtggttgggtcttagatattttaaaactttaatttgaatataatttttttttcttttttaaaggtttttgatgactgccacgaaggtggtgagatttcaccatctaactgtatttacatgacagagtggctcgaattttaatagagagctatgaactttattgacattttgcaaatgaagttacttagggagcagataatttaattcatgatggaacacgaaatctccttgaaagcaaacttcacaataatggacgtagacttgctgctatgaaaacatattttttttatttatgaagactaaatttatattggtaaaatagccagtagaatatgaaagaaataaggttagtagtgaaattcattcttcaataaataaaacactttgaaactccggaggaccacatctttcaagacttctgatgggtcaaggaaaaagatgccaacatacccgtatttaccaagtactatgataatggctagagtataaaaatgttctttttaaagttatttattaagttcttcattggaagtttttttttatatctggttcactaccaccattttctgtttcctactttctcagtggtttcattgaaaagaaattagaaggggttaaaggcaggaatagcaaagagtgcaaacttggggtatgactgggggagagtggaacatgccttttccgcacaatattaattcctttttgtatcagaaatgttcttttaggagattatgctaccatacttacttcaaacccaatgactactgtcaaggacatattttcagtacataaatactatcattttcattctaaagaatattttcactgttccttctttcttaaagtcttatgtttcactctttaactcaaatgtattctttgttagaatttaccctagattcttatttaatgtctgcagtagactgaatgtttgtgtgcccccagaattctaatgttgaaatctcatttccaatgtgatggtatttggaggtggggcttttggtaagtgataggtcaggagagtaacagcgctcatgaatgggattagtgcccttatataaagagacccagagagctccatcaccccttctgccatgtgaaagggagaagacaaacatccacgaaccaggaagtgggtcctcaccagaaaacaaatctgtaagcaccttgatcttggacttctcagcctccagaattgtgagaaataaatttctgttgttgataaaccaccagtctatggtattctgttatagcattaactgaaactaaatatactccgtgccctccattcacactttattttgagagaggggataacattctttttctcttactctgttttagatttatttcccttccttattctgttctaaatcatggtgtgatgtgtctaagcagaaagccattataattgtcctcagttctaataacactttcagttcctatggtcagccacatagaaaacactaggttatttgatgtattgttgcacagaagttgactgtgcggctttttagaattgcagcttcatattttcactttgtagctccacttagaagtttctgtatccaagccaaaaacatgggacccatggaaaggaattcaagctccactagtactgagggttgggttctaataccagtttggagatgctctaagtggatatcagaagagttattttaagataaatggtatcagtaaaataaaattcaggccacattctgtgaattagcatttgatgacactagctctttgtaacaaaaattatttcaagtattgaatatacatacatatataagatacacagccttttggccagaacccccatcttccagtaatttgccaaaatgatgaacacaaacggaaagaggagaggcacccgatatatgttctctaggacttttagaaaacatggagttgttcctttggtcacgtatatgcgaatctataagaaaggtgatattgtagacatcaagggaatgggtactgttcaaaaaggaatgccccacaagtgttaccatggcaaaactggaagagtctacagtgttacccagcatgctgttggcattgttgtaaataaacaagggcaatattcttgccaagagcattaatgtgcatactgagcacatgaagcactctaagagccgagatagcttcctgaaatgcatgaggaaaatgatcagaaaaaaaaaagaagccaaagagaaaggtacctgggtttgccagggatggtggctcacgcctgtaatcccagcactttgggaggctcaggcgggcagatcacgaggtgaagagatcgagaccatcctggccaatatggtaaaaccctgtctctactaaaaatacaaaaattatctgggcatggtagcgcacacctgtagtcccaactattcaggaggctgaagcaggagaatcgcttgaacctgggaggcggaggttgcagtgagctgagatcgcgccactgcactccagcctggtgacagcgagattccgtctccaaaaaaaaaaaagagagaaagttacctgggttcaactgaagtgccagcctgctccacccagagaagcacactttgtgagaaccaatgggaaggagcctgagctgctggaacttattccgtatgaattcatggcataataagtgttaataaaagatctctggactgtaaaaaattatatatataaatatatataaatataaatatatatataaatatatataaaaatatatatgtaaatataaatatatatatatgtaaatataaatatatatatatatatatatatatatatatatatatatatatatatatatatatatatatgaaggatctgggaacctgaaactacagacagagggtttctcttccaccctcagtgagagttggaatggtaagaacaatgtctgtccttcctgggacttggcctatcaaaaaggcactagttttatgtagtaagaaaaatgaacttggaagagagctagaaatgagaagaaaccagcttgtatgttttaaatatagactttgtcttatgtctttatagctaaagattggtttttagagcttaacattcaatggctaaaacaaaagtattccttacctcaccaataaagagaaacttcaagcttttttcccatggtatgtttttaattctgaaaattaactgaaggagacaagagacaatttaaaattacagcacctctgatgaatagttaaatggatcatttatcctacagggataaactgtaaccaaaacagattgtggggctctagactccggacagcaccaaaaattcaagttgcatatgaagtcctaatacttacagttgatttccattcagtattcggtattttgctcacctgagaatagatactccccagagtgtatagaggcccctgtatattcaatgatgaccacaaagaatcaaacagaaatcagaaatgacagtccatggctctatggtttttaatgaatagtttgtgtagattttcccatgaaacacccctgatcttagttgggtgatttatagacctatgatgttggtggtgatcagctaagcaaactagccaaacagaagtaatttcaaattaagtcacttttactttgtgctattactcattattggatggtgggtgaggggaaaatacaaaatatatgtcctagaccaatgttgtccaatagagctttctataatgacggaaatagcctatattggctggtcagtaaggtaaccaatagccaccagtggctgttgagcacttgaaatatggctagtttgactgaactgaattttcaattttacagctagctgtggttactggttactatatttggcagcaaagttcaacaatcctataggtctatcttaattacttttataggaatgaagagtatcagaattatttctcaattatatatatttagttttcatttctacagagaaagaggtcaacaaagttttgtgaactaaattgtataagtttcttttttaggaaaggacttcacagagaacaaggcaaagaataagtaatacaacagcaaatttccaaaaaattcaagtagaatcaaactttgactatagatttggtcaaattagtgctaaacagcctctttaacaacattattattcaactgatttatataatttgctttttagtagtcaaatacattgttttaaatcttaattatttttgattataaaatacatgcttagtgtaacaaattcaaataatcaggaggataaagtaaaataaggggccgggcatggtggctcatgcctgtaatcccaacactttgggcggctgaggtgggtggatcacttgaggccaggagttcgagaccagcctggccaacatggtgaaaccctgtctctactaaaaatacaaaaattagccaggcgtggtggcacatgcctttagttcacactacttgggaggctgagatgagaatcacttgaacccgggaggtgcaggttagagtgagctgagatttgtgccactgacctccagcctgggagacagagcaagacactgtctcaaaaataataataaggacgtccaccacactttacctaccaaaatgcccattccccaaagatgattgctgttgaacgattagggtacctttcctgattttttttgtctaagcacatttaaaaaccaagacttttggttttgagcgatagctctgaatctcctttaggtatgaagtgtaggaaattgtatttctgcagcaaacttaggctttgcaacatcaagtgtggattcactggaaattatttgaaggaacacatagcgatcataatagccaaaaaatgttgggaaatgaaaaagggtgggtttttttaattaaaaaaaaatttttttttttaagagacaggttcttcgctccatcacccaggatggagtacagtggcgcgatcatagctcactgaaggctcaaactcctgggctcaagcaatcctgcctcagcctcccaagaagctaggactacaggtgtgcaccaccatgcctagctaatgttttaatattttgtagagatggggtcttgctgtgttgccctggctggcctcaaacacctggcctcaagcaatacaaccacctcagcctcccacagtgctgggattacaggcatgagccaccacacccagccaaaaaaaggttttctgaggaagtatgatcagaagaaaatggaatgtgcttgaaagagatctaaagggccatggaagttaaaaggtttaactctatagaacagaacacgaagtatggaaaggttctttttaaaaacacttgtcttttggaacaaaatccaaattgtccccatgatttcgtcctttgacattatgttcatcttggttatcttagtcttttctcagacttcacagacaattatctaaaagcccctggctaagtgaatgcttatgactgtggtcacaaatggatggcttggattttatttgtcttgcagtgtttgtaaattttttgatgtatactgttattgccaacttacatactccatatgtatatggattgtatgtgtatgtgtgtgtgtgtgtgtgtatatatatatatatttgcattccccaaatttaaaaactacaatttggagatttttttccacacaaaaaatcagaaaattggcaacactctgccccatttccacatggcaacaatttagacaggccatgagctctccacatggctctgatcccaccactcttgtctcaaacaaatctagtcagttgtacgtatattatgaatgtatattgctgtgcttctccttcctgcctgactccggaagactcctgtctcagtctctctcaacatgtctgaaggacttaggggcaagtgtcagaggtgaaggccctagtctgagtttaatgtctggggccagcttgaaacagcagctagtattttgagctctaagctaacactctggactttcagtcatgttttctttccccagtgaaatagaaaagtttgatttcaaagaggaaaagtgtgcaatacctgcaacatacataaaacctatttaattttactcaggagtgggaatcaagaaacctgggttctgtttctgactcacttcggatagagaagggtagttaagctgtccttatgtttcttatcaaatgaggaaaatactgtggtagttcatagcaatttggggagttttagagtctatggaaaatggaagtgctatttgtaacttagattgaatgttgaaacttgtgtttgtttttcaggcacttacggaacttaactggatgttctatgtgtctagtaatcagctgatagtagatattattctactcctatattgggatgcaaaatagcagaaatcatacagtctatgctggtactttcagcaaagactttacaacagtaatcagttcatgaaactctgtgttctgaaagtggccacagtcagtgaatttgtgcaatttggtttccaacctatcggccacttcttgttgttccttccagggaaggaacgggtcgtcagtagagccaaactgcacaatgtaagggcagttggccttgatcttctcccactgccaggggcgggtgaagtatcctatggggaaaaaaaaatgatctttcagtacccatggataatctcccttctagatattctaaaatacctactggcgacccacatagagacgcaaaggagcagagcctccgtgtgagttagaagcacttcttttgttttcaaatctgtagggcttgataccacagttactcgtgaagaggtggtatatggttcaactaaaaccaggcctctagggttcagttctagacttacagcttgggaagaaatcaaagtgcaaacttatatccaaagataggtggtatatctttctcatatgctattagaattttttagcctatctgaaagacagcactgtttttacaacctaaacagacagccccatgtctagagaagggctttgctcagatttctacctttggacttaccacttgcacgctcattttcatcccccaagtctgatgtgtacgcagacactaatacaatagcatatactcgatgtgtttctgcatacctggagaaacaaaaatgatgtcagctaatatataatgttacctctgatcaccaaaaagtcaataaactacttaaaaactcatttgaggtagcctacagaaagcacgtgctacctgctgttgaggttgatgtgaaaaatggcaaggaaactgcagaactataagcccaaccctggctactggatgagcttctactcatttttctttttttttttttttgagacagagtctcactctgtcacccaggctggagtgcagtggcacaatcttggctcactgcaacctccacctcctgggttcaaacaattctcctgttttagcctcctgagtagctgggataacaggcatgcaccaccacgcccagctaattttgtatttttagtagagacggggtttcaccatgttggccaggctggtcttgaactcctgacctcaaataatccactcaccccggcctcctaaagtgctgggattacaggcgtgagccaccacgcccagccactacccatttttcaaggtagttgaaacttgtacaaacctttcccaataaacaaaaaatgtgtaatccatccacgtttagtatgcatcagtgtcacttggttggtgaacatgcagattctcaggctcagacccagagtctctgattcagaaagttggcattaaggcctagaatctgcattttaaggcgtgatccctccttcaacccagatgactctaatgcaagtggtctgtgaactgtattttaagaaacactgtataataccagaaatgtacctttgttaccacacactccacattgccttatattattcatttgtgttgtcttatgtacatttctctcaataaattgtcagctccttaaaggcaggcatgagtcctattgatctttgtgttcctggtgcccattacagtgcctggcaagtagacacccagctaactcttaggttggtacaaaagtaattgcagtttttgccattaaaagtaagcaggagacagacaagaaataaacaggatgtcagatgcaatgcataatccttgactagatctaggattgactagatctaggtgaaaagtactacagataataagatataaagaggataggagccagtagagtgagtctcctttattggcaaaaaccacagttatatttgcagagagcagtctccctcagcaaagactgggataaggaaagacacatagtagtaataatttcaaggggcctttgtgccaagaaagagttagggttggtattttgttcttgggcctgaacttttttccccatttattttgaaaaatatcaaacctacagaaacgttgaaagaacaagcacctaggccgggcacggtggctcacacctgtaatcccagcactttgtgaggccaaggcaggcagatcacctgaggtcaggagttcaagaccagcctgaccaatatggtgaagccccgtctctactaaaaatacaaaaattagccaggtgtggtggcaggcgcctgtagtctcagctactcgggaggctaagacaggagaattgcttgaacctgggaggcagaggttgcagtgagccgatattgtgccactgcactccagcccgggcaacagagggaggctctgtctcaaaaaaaaaaaaaaaaaaaaaaagaacaagcacctagattcattaattttgtcacatttcacccgtactttagcatgtatctcctgagaaagccactcccttaaccatggtaccactattacacccaataaatttcacattgatacagcaatattatctgtattcatttttccccaactgtaccaaaaatgtcctttaaaacattctgcaatcctagatctagtcaaggattatgcattgcattttattttcatggctcttcagtcactttaaaatttttttgttttaaatgacattaacattgtttaagagtgtaggccagttgtcttgtacattatcctctaaataggattgtctgtttcctcctaactagactgaggtaaacatttctggcaaggatactgcataggtgatgctgtgtccttcccatgccattacatcaggggacacatgatgccagtctattattggtgagattaagtttgatcatttgcttaaagtgatatccacctgatttctccattggaaaggcacgatttccctttcatgattagagtcatctgtagggtagtcctctatgattttgtcaataggaaattctacaaccttaacccaatcgttttggcatccatttttctccttgcctcccttaactttagaagtcaattcttagaaggttgctaagaatcctgcagtgagttcaaggatctttaaaagcaggcacacctttactaatcaatggcttgagaaaaatgcagttggccttgagttggaacagaattcaataatacaaggagctcttccttttccagacaacccctggcagcatataacattcttacactgggagtgtaccataattttgtggttccatcctgaaatactcttgtaactttaatcagtgtggctgaaaggttatgaaatttggcaagattccctgacatgcaattcatgtgacagcctaagtgactgcttgggacaaataaaaactattatcctttgtcattttgcctagcaaatatgaaagaaactcaacccttataggctaaacttagcttattcagccagctaagtccctacccactaggccttataaggctaaaaggggagatgtaatattctaatgagagcagtagggatgtgcatacgaatcctaaggactggggattcgcaggtgagtaacactgcagacacaatctaccatatgccaggctctcttctaggcaatggggtttcagtgccagagtgaacaaagccctgccttcatggagtctacattctattggcaggagacagacaagaaataaacaggatgtcagatggtaaaaagtgctgcagataataagatataaaagagataggagccagtagagtgaggaagccatttcatatggagtgattagagaaggcttcaccaaaaggggacatttgagcagacacttcaaggggaatagaaagccatgcagtgtctagggccagagtatcccaggtagaaggatgagagcaggctaagatgtgcatgtacttggcatgttccaggaactgcaatgaggtcagtaaacctggctgggaggagagaaggagagtctgtagagacagaatcagagctgactgatgggaagctactggggtttgcagccacttatgctttaaaaggatcactgcatctcaataagagcagattttttgttttctttcaatccactagcaaaaccaggaaggaattaggacagattatgttaccactttagaggtcagcactgtttcctctgcaacagaaatttaagatatacgcaaggtatttctcaagcaagcatgactggagcccacaaaggggatagcagtttaacaaagatcgcacctcatggccgcgatggccccagaactgtggccaatgatgatagtcttctcatcacagtgcagctctgtctccatgaagggcagccagatgctctctcgtgctgtaacttaaggttcagggtaaagaaaaagtctgtcatttgatagtggcagtctgaatccaacgctgccccacctttcaaacaggcaactattcagcagttcacaacttttaaaactgcaggaccacagcaggagaccagactgtattaacaaaaccaaagatttatgtattactacttgaaagatccaagtccacagttttggtaactagtttttcttttctcttttttttttttttttttggtttaccatgttcttgtaagaaaatactaaggaaataataaaatataactctgaaattttaatgtaaactttcaaacttgaaaaaaaaagctaatggtcaggtgcagtggttcacacctataatcccaacactttgggaggctgaggtggacagatcatttgaggtcaggagttcgagaccagcctgcccaaatgctgaaaccccgtctctgctaaaaatacaaaaaaaattagccaggcgtgatggcgcatgcctgtaatcccagctacttgggaggctgacacaggagaatcacttgaacccaggaggcagaggttgcagtgagccaacatcacgccacagcactctggcctgggcaacagagcgagactccatctcaaaaaaaaaagcaaaaaaactcttgcaacattctaaaattcacatttattcattctttccaaaaaggggattcctgagacaagtcataggcatacccagaacaaaagtagcaatatgacatttttaaacattaggacctcaaatagatgctgtaaagttttatacctatgcctcaagtatagtacccacaaattctgcctgaaaatatttgtagacatatagaagggaaaaatcaagttggtgcaaagttgaaaattaaattttaccatgcccaggtgctttcctaatccttactagaattttctatggcttaccccatccgggaggtgaggggcgcctctgcccggccgcccctactgggaagtgaggagcccctctgtccggccaccaccccgtctgggaggtgtacccaacagctcattgagaacgggccatgatgacaatggcagttttgtggaatagaaaggggggaaaggtggggaaaagattgagaaatcggatggttgccgtgtctgtgtagaaagaggtagacatgggagacttttcattttgttctgtactaagaaaaattcttctgccttgggatcctgttgatctgtgaccttacccccaaccctgtgctctctgaaacatgtgctgtgtccactcagggttaaatggattaagggcggtgcaagatgtgctttgttaaacagatgcttgaaggcagcatgctcgttaagagtcatcaccactccctaatctcaagtacccagggacgcaaacactgcggaaggccgcagggtcctctgcctaggaaaaccagagaccgttgttcacttgtttatctgctgaccttccctccactattgtcctgtgaccctgccaaatccccctctgcgagaaacacccaagaatgatcaataaataaataaataaataaataaataaataaataaataaaaatgacaaattcacagaattgaaaaaaaaaaaaaaaaaagaattttctatggcttttggttcacaccctcctccccaagctgcttgccttattctttcttaggtatataggcatctttggttcctccactatgatattcttgttctctaccacaaaaatggtaatatcaaaacccaacaagatgaggctatttaaaaacaagtttaaaacttacttgggtcgggcatgtttttagccaaacactggaaaccaggtatctatgatatgaggggggagaaaaagctataataaagagcttaattacaactaatactttgctaataagaaatgaggcacctgatatgatcgttaccaattcagtattaacttgtgttatgaaatgaagtaggttaagtgaccatcttttcgcatgaactccatctgtagttctgtatctaggcagctctgctgatctctatagagagacctatatctgcatttgtacacccatatttgcctctacaggcctgcatctatagagaggcatgaacaaatgtgttctagacagactgacctggagccaaatagactgtgttccagggagtaggtaaaacgtggcacaggaacgtgatacagaaatttggagacagcatactctcagaagctccagccctgacctttggggttgtaactctgaccagggttttcagccacagcgctgcaatctattctggagacccgctctagaggacagcaacccagggagccgacttaccgcctggttacagaagagggttaaaaaataaaaatcaaacggcacaggtcagcctacagtaagatgccacttttataaagctcaccaagaagccaaatagaacagtctgttgtttaaaaggtatattcataggttgaaaagtacttcaattttaaaaagagaagcagatgaaaaaattcaggatggcacgggactgagatgggtagacataagggtcgtttggaagatgatgtataggcaatgtcccaggttttagtttggtaattcattacattatgcctcataatgtagacgcatgttacgtatatcctttgtatatattaagtatagcatatttaattttttaaaagctgaagcgggaagcagtgaacatgtaaaattatctgggaagtcccaaatctgaaccagcagcagatacggggggcggggctcaggggctcagcctcggtagttcaaaggggttcctttaactctaaaggctgagccctcagagaagtcttccaggcagttttaccagtcaaaattcgaccactagctcagactttaagagaaggcagcgggggagaggcaggaaaacacacagggctttgctagaggggattagacgcctattcaaacttcagccctcagtcctctcccgccgtccctccctccaggctgacttcacggagcagcggcgttgggcgcttaccttctccagctcctttttcacccagccataccagccgtgggtggtcacatccccgcctccgttcccgggaacaatcactgccttgctaggagaagccatgagtgcagcgaggccagagttccccagcgcgggtccagcggagctgagcccagcctgctcccgcagggagcctgcgccgcggcatcctgggagttgtagttgcggggacctgggaggccgggctctttcctccttggcctgccttccgctggctgcgtggggcagccaagaacaaagcctgcgagcttccatcaattgtaaagcaaagcaccctttacttgcctcttactagtgctctcatgtttttcccttatttaagacaggctatgacacggttggggtgtgttatttctttgctagatttactgatatttctataggaaagtttgtttttggtttcaaacatgcagaaaacccatttataacctgggaacgcctgaaatccatattatttttccttctgagtttaaaacagtttttagtagtcagtatcagccctggttgttgtttttcattgctttgaatgaaatttccttgcataaagctactaacccaagtaaaacaagcaaaaatttaattaaataccaagaaaatacttcgtcagattttcatattaaaccagctgatactgaaattgtttaaaatagtttataaccaatgcttagtcccatattcctgggaagacaaacaaagcttcatgtacatttggtcaccgggtgggccatttaaacattttgtaaggggatttcattcaattgttatttgaattccaatttgtcattctggttgtataaaagctttcccatgcaagagggctgatgttataacagtagattattatgctacagtgtattttcccccggtaaagaaagctttttatggtttgaattttctggaaacattggagaagactgtccttgtcatccacactacaacaaaacttcaggaccttgggctttgggttcatggtctcgcaaatgagaacggtccctccacacttttggaacagtgcacccattggaacttttgaggtaaagctaccctgggaaatttctcccaagaagaaaatggcatccttgatgtgaacagcttttcccaagttcacagattaagacttctactaccatgaaactcttatctttcaatattttttgtcttccttatgcctctacaaacaatagaagtggaaaaggggtctgttatgtgcacttatggggtatacttttatttgtgaaggagtttgcagccagccttatacatggataaacttagactttgatagataaaagatgaaggcccgaagtaggtaagaaactttaatggtacatgcattgcttcataatcagtcaaaaacaaaacattggttcactcctctaacccacatcatgggttaaagaaaacattgccagtaggccttcactcttctagaaaggcatcatttgttaggtccttttaccatggtttgaagtaaaagaagcaatgattagaaatgtatccctcattggctgggcgcggtggcttacacctgtaatcccagcactttaggagtccgaggcaggcagatcacctgaggtcaggagttcaagatcagcctggccaacatggcaaaaccccatctctactaaaaatacaaaaattagctaggcgtggtggcaggtgcctgtaatcgcagctactcaggaagctgaggcaagagaattgcttgaacccggaaggcagaggttgcagtgaaccaagactgtgccactgcactccaacctgggcgacagagcaagactccgtctaaaaaaaaaaaaaaaggaaaaaagaaaaaaataaattcagtggtagaggattaacgaagaaattgcttagtcaagtgagtaaaccctttatctagctcattctttgatctatttgattttaggaggtttggtttatcggggccttgggtttaggagcataccccgaactcttggtgttatcctcccaatatttataataatagtctccctggtgtgctgtattctctcaaaggttttaaatgtttgcacgcggtcatctctagaacgtcagatgttctctcttcaactggaatgacaaaagctgaaagaaatgtgcaaccatgagaacaccaaaacctataaatgatgtgctgagaccgaaacccaaaatgatggtaactgagagtggcgctaaggccctaagttttggtcacactctcacctaagtgagaacctgaccaaaaagggggaattttttgcacaaaattttgcgaggccattgttttggactaagctcatgcattaggccccaacaaaccaaaccaaaccaaaatggagttgcttgtgctaagacttcaaggaaacatagattctagaacagactaggttttgtttttttttctgcaaatctctataacaaacatctctgacagcgtaggtatccaccccatgaagttcccattaaatcttttttttttttttttttgagacggagtctcgctgtcgcccaggctggagtgcagtggcgcaatctcggctcactgcaggctccgccccctggggttcacgccattctcctgcctcagcctccggagtagctgggactacaggcgcccgccacctcgcccggctaattttttgtatttttagtagagacagggtttcaccgtgttagccaggatggtctcgatctcctgacctcgtgatccgcccgcctcggcctcccaaagtgctgggattacaggcgtgagccaccgcgcccggccatcccattaaatcttttaaccaaattaatttcctctcgtctggagaccatcaagcttcagatgatcatgcaacaaaggttccagccagttccaggtgaagacaccacccctagccatcaagaaactaccctgcctccactagatagagcagggcgagttccatgatcaccagtaggtagggactacaccccaagccagcatgaagcagttacagaaaaaagaccatcagtccctctgcctcccataaagatttatggggatcacatctctcagcgggcagatgagccaggaaaatagggtctggaggcagggaacagaaggccgattcacacttcggtaatgacaggaaatatcctcttcacagggtgtaggccaactaaatgactttgtagctttacttcatcctcttcatttacatagggtgtaccccaagtagagggtatttaaatgctcaaaaattctataatggggattttgaggccttatgctcaggcctgctcccataatgtagagtgtactttcattttcaatgaaacccttctttccttcctttctttgtgcgtttcgtctaattgtttgttcaagacgctaagaaactggacaccctccaccattaacaaagggacatgaaacttttgggggtgatatatatgtttattatctcgattgtggtgatgggtgtcaaaacttaataaattgtacattttaaatatgtgcagcttaaggtacatcaattatacctcaatataactctttcaaatttaaaaatagtaatcccagcattttgggaggctaaagcgggaggattgcttgagcccaggagtttgagactagcctgggcaacatggcaagactccatgtcttcaaaaattttttaaattagccaggcacggtggtgtacacctgtagtcccagctactcagcaggctaaggtagaatgatcacttgagcatgggagactgcagtgagctatgatcatgccactgcactctagcgtgggtgacacagtgagactctgtctcaaaaaaaaaaaaaggaataaaatgtcaacataaaacaagcagagacattcctataaccaactggttgtttgcttagtagtttttagttcaagaagcagtgatactccctaaacaggaactgggggctgaaaaaggatctagcaatctagcttcccttaagatttagttagctcattcttctagaaggagaaaaaaggcagtgacattaactctcatcttaggttgtttatgccaataataattgagaagattataattacatatatccgttttgttttctactttttatctcttgtacaaacaatttctgagcttatcattatcacagaagaaacagttttagtttcaaagctaaaagccaacatttttgtccattttattttttgagatgaagtctcgctcagtcacccaggctggagtgcagtggcgcgatctcggctcaccgcaagctctgcctcccgggttcacgccattctcctgcctcagcctcccgagtagctgggactacaggcgcccaccaccatgcccagctaaatttttttttgtatttttttttttagtagagacagagtttcaccatgttagcctggatggtctcgatctcctgacctcgtgatccacccgtctcagcctcccaaagtgctgggattacaggcatgagccactgctcccggccatttttgtgaatttttaaaaatctgaaaatgcacctttatatttggtacctcatttgctaatattgaagaagttgttctcaagaacttgctgagacagtttgactctttctaaagggatcacccaccctccactgaggccctccttctaaagggatcacccaccctccactgaggccctccttctaaagggatcacccaccctccactgaggccctccttctaaagggatcttccaccctccactgaggccctccttctaaagggatcttccaccctccactgaggccctccttctaaagggatcaccctccctccactgaggccctcctgctgaataatcttcctctgcctggatttttcttttcaggtcaggatgttttctgtgggaagtttgtctctaagtcttcaaactcacggtctaaatctattctcctctcttctgtggttacttttcctttctgccactgcttttgtttacttgtttgtttgaattttggttttgccaccttgaggagaaaggaggtcaatggaagccttcttcaaagtcttgaagcacacatggcagctcctgggaaaggaagggaggtgaagaggctgttcttggcagagaggaaggcatgcaaaagggcactgaaacaacaaacagcacatgtgggctgggaaggacagtggttcattactggaggattgagatctgtagatcattgaggcccgtgagtagcacaggggcccctactgtatcctgtgaatgatgggaaaattatgtaaggttttaagcaagagaatagtagggtcagatatgtgatttagagaagtctatccagcaaccaatgtgatttttagatcgggcaaaatttgggcaaaacaatcattcgagagactgttgcaggaatccaatcagaggatgagtgcctgaactaagcaagtagatgaaattgagaaatagagtaacaaattaacaagaccaagtgattcagtgtcaccttcaaggtggaggtgttagaaataaggaggagccaaggataacttcctactttatagactcagtaactgggagaagaatggcatcttcaagtgaagatgtacaagaggcagaaggttcactgggagccagggggatgatggattcagtttaggacatattaagatcgagatgtgcaagcatacccagtgatatctgcaggacatttctccagacggccttggactggcccagttctccccactttcttgctcatagttctgaagaataattccgatgtgctgggaatatagtattctgagataaggaggaaatagccagaacagcccaggctgtgttctagcctcactaaaaacaagatgtccttcaatgcttttacggcttttcccagctagaatacaagtgggcatgcacagacgagactcgatctgcaccgtgtggctttcctgagtcttgagagaccagctcatgttgaatcctaggtttctgctgtcccttgctgcttctctgtgagtaataaatccacttcatgtaacttgtgtatgtgagtgttctggctcaccagactcgggcaggtagtagaagtacagcccaagatgcagtgaactgaattggtaaccagtgcacagtaaacacactttgaagaacccagcaggttgctgaatatttgaatcggatgttaggtagaaaagtctgacccagaaatacagaatttaggctgagcgtggtggctcacacctgtaatcccagcactttgggaggccgaggtgggcagatcacctgaggtcaggagttcgacaccggcctggccaacatggcgaaacccctactaaaaacacaaaaattagccaggtgtggtggcctgcgcctgtaatcccagccactcacgagactgaggcaggagaatcgcttgaacccaggggcagaggttgcagtgagccaagatcgtgccactgcactccagcttgggcaacagagagagactccatctcaaaataataataataaaataaaataaataaaagaatttagactcaggctacagatgatgataatatgtcagaaaaattatgaaagattttgaaatagtcaaaagaggttactgggtgaactttctgtggagtgctgtgcatttttaaaagactctctgggggccgggagtggtggctcatgcctgtaatcccagcactttgggaggccgaggcgggcagatcatgaggtcaagagatcgagaccattctgggcaacatggtgaaaccctgtctctactaaaattacaaaaattagctaggcatggtcgtgtgcacctatagtcccagctactcgggaggctgaggcaggagaatcgcttgaagccgggatgtggaggttgcagtgaactgagatcgcgccactgcactccagcctggcgacagagcgagacttcgtttcaaaaacaaaaaatcccctgggtcatttgccgtaggagggatgtacctctgcctttgagtatgctattttacaactctgtagagatagaaattaacttatagaagatagtaatgcaaatgttccctgcccacaacaatgaaaactattcctgtccacagcaatgcaaatcaattttgtgtgatagagaatatgtcactataaatcaaattctccttagaaccagtctgaacatccctcctggtcgtagggattaattaaaatcaatgaatgagttaagtaagatctttggcacatgttcattttatatttgcatgaaggccataattttaccttttgaaacactttaacagttttgaagctttcaccaacatcccaatggattcacctgacagaaccaggtaaaccacattactgaagaacaccccatggggctaagcccaagcacattttttcctggctccgggagtgaataccaagtagcaatagtactacagcgttgctgactttctccctaggtttctttctcctccttactgattttgggttttgtttctgattcgcccacagctggcggatttttccccatgaatggcgacaccaattaggaactcgcgggaaaccccgttgctccctttcccctggctggcagcgcggaagccgcacgatgcctggagttcctgtaaaccacgtgaaccagcgggacttcgtcagagctctggcagcctttctcaaaaagtccgggaagctgaaagtccccgaatgggtggacaccgtcaagctggccaagcacaaagagcttcctccctacgttgagaactggttctacacacgagccggttccacagcgcggcacctgtacctccagggtggcgctggggttggctccatgaccaagatctatggggacgtcagagaaacggcgtcatgcccagccacttcggccgaggcttcaagagtgtcctccgccgggtcctccaagccctggaggggctgaaaatggtggaaaaggaccaagatgggggccgcaaactgacacctcagggacagagagatctgggcagaattgccggacaggtggcagctgccaacaagaagcattggaacaaaccatgctgggttaatacattgcctcattcagaaaaaaaaaaaaaaattaggaactaggttttacattctgaacatttggtgatctctttaagtgaattaatagtttttagagatctattctcttttggataagagatgatgaaaaatctggtttgttagtctttttgtttgtttgcctttttgtctacttatgagttcaaatcagttaagacttccatgcccattgggaaggagaacagctttttgttatctagtccactgaatttttatgtttctgaatttactttcgacctgtggccaaagttgcagaaccaaagctatatgctatgtgtctatgtgtcttcccggctgtaatcaacaaaggccttcccctcttgttgtgggagtaaaaaaatcttactacctttgtaaagttttaataagttatattatttcatgtcttaaaggagctctgttataattcacttatggaaacaaacacatgtaaatcaattatttctaaaattccagaaaataagtaaattaaacttatgcatgcaaaatttcttaaaaatgctgaaaccatcctgacagggttaacaagattacaagccagcctttaggcaggttagttaggcactgaccagggtgcattggtgcccttcaattcacttccctgcagctgctaactaaccaaaagccttgcagcacactgatcacctactccctgattgctcctatccacagaatctctgacactagctctttgtacccaggaattgcttaaggtatttttcagatcctgaattcccacaaaacagctgatgccaaactgtctagggatccccaccaggaagggcacagtggctcacgcctgtaatcttagcactttgggaggccaaggtgagaggatcgcctgaagcccggagtttgagactagcctgggcaacaaagtgagaccctgctttacaaaaaaaaaatttttttaaataaataaataaagacctccaccaagaaacaacactggaatgaagtttcttcatctccctgtcccatgacttcacctctcacttcctgaccaatcagaaatccccacactttagcccattgcccctccagacttcttaaaaatgccatctctaatctcttggggaggtggatttgaggattgctcttgtctcctcatttggctgccacttgattatggaactctttatctgctgcaactcctattctttctgttaccgcacaatggacaatcgaacctgatggtcctataacaatctttcttacagaaattgctagtacagaaagaatccaggttcaaataatcaaggcaaatctttggcgaataatattaagttttggttaaaaaaaatcccagctatgtcttttctcagtgttaagtattatacatgtgtacattttgagtttgtttccttaccgagaataattaatctgaacttcctaaatttataaaagtttactattgataagctaatattaacattacattgtttaagatcctgaaaaatgtgaatttgttcaacaaaactgaatcattctcacatttaacagtaattgtttctttgtgccttaaactattaataatttctatgatctgtagataacttaaaacttagtattaaattgagctaattaatggatacttcttggatgcctagatatgttcttgcataattttatgtttacatcgttttgcttatttttatatgctacagagactacaactctgagtcacagtaatgatgtgttcatgtttgccacttgtcagcgtgtgtaaaaatggttgtggtggctttatacagttgtgttctatcgcgccttttgcagcaacatggatgcatctggaggccatgatcctaaaagaattaacgcagaagcagaaaaccaaatacatgttctcacttgaaagtgggagctaagcattgggcacacatggacacaaaggtgacattaatagacgctggggactactagagtggggagggaggcagggaggggctgaaaaacttgggtactatgctcagtatctgggtgaccagctcattcgaattcgaaacctcatagccaggtaacaaatacgcagtgtaccccctaaatctaaacgttggaattattttttaaaagaaagttatgttccatgtatttctaagcttactctcctaaaatggttgaatattacagttctcaattatttatctccatgtagaaggatgacagggactgtgcgctagtgccagcctccgctgagagcgccaagacattacagcaagcgacggtaggagagcttgtaacgtgaagcaccaccacacctctgtacttcaaacttaaccacagagaccgactcccaaaccagcaagtgcgtaagcgccgccgcgctcaccacccgccccgccccttccgcatgctaatgccttcttccggcagccttagtttcttccaaccagtgcagctccctgttccgcgagcatacgtcatcgttctcgctttccggtagctaaggcgatcagcgggacttcccactgagacgagcggatgtcatattgtatcagggcgaacctctgaggagcgctggctgcgcttaggcaacggtgcggcaggcgccggggttttctgaaacagaaacgtttaggggtggggaaacgtgttccgaggaactctcgttttgaagtgcgacatacacctgtcttgccctgttccaagatggtggcagagcttctctgagtctctcgcttcctccagtccgtcggagaagcgctctttgattggccagtggacagcgccgtggcatgacgcgctggggcgctggccaatcggttgagagctgagctggacttggcggtgggagccggagcctgcttgttgcagctgtgggtgaggacggctctagctaggtgagcggctccggccaggtgagcggggcgcataggtgacggagggccgagggcacgggtatgagtttctgccgggggcgaggtgagcggcttctgggaggaggccttttcttgacagtttagggtagcgggggaatggatgatccgggagtcccctgcggatgtcgtcccgcaccaggccgggaccgatttctggctccagtttccccagaattgcggagtgcgcacacctggaaggacccaagtcccgttttatagttgagaaactcaagactcagacaagtgaaacgacttttgcttcatgacagctggaactggaacccaggtccttggactcccttcaaggattaaacctcacttattcttacatacacatggtcactgtgtcctgagaagttacgagttggcgcgataagggtggttcagattttttggcatattctcctgttatctttccaggcctttcattcattcactaattcatactttcagttatttacctcttcagataccttccccgatactttggtaaaagctatggacccatctccctagaaaaacggcatattccctcatgcgcataacttcagatgattagtggaccttctatagtccccttggattatgtgtccactgctaagaatccagaccctagaagggtgagggaaacaggcagtaggaaaaggagggagcaggtcttaggctgtacatgcttggaaaccattagatggaggcagtagcttctttttttttttttttttttttgagatggagtctcgctctgtcgcccaggctggagtgcagtggcgtgatctcggctcactgcaaccaatgcctcccaaggtcaagcagtcctccctgccgcagcctcccgagtagctgggattacaggcacctgccaccacgcccagctaatttttgtatttttagtagagacggggttttgccatgttggccaggctggtcttgaattcctgacctcaggtcatccaccggcctcggtcgcccaaagtgctgggattacaggcgtgagccaccgcgcccggccgccagtgccttttaataaagaacgttttgagagagagacggttatttaatgaaatctgctgacatacttgctgagagttgtgatagaacttgctttcattccgactttagttatccctttgcttcccatgaagctccagagtgcttcctgtgcacacagtgcttcaggttcttgccgttgccagaaataaacagatttcttagagtttcagttggagcaaacattggaattcttgtgttctgggctttatgtagtagagtaattcatttgcttttctagccatgcaatattattgccttaatcaaaattatttacagtatggtacttcccaaaataacagacagttgttatccatattcaggaagtgggcgcgagaggccactttaatttgatagactctttaatttgcctttttactacttttcttgaggggcttgttcccttgaaccccaatagctgagttgtgtgttaccctagattttaggatatgaacaggatgtataaatactcaatgaagttgggatcatctgggtttgagagtttagcctgtaggacagttttactgaccacagtcttcattttttttttgaaacagagtctggctctgtcgcccaggctgtgcaatggcattgtctcgcctcactgcaatctctgcctcccgagttcagacgattctcctgcctcaacctcctgagtagctgggactatgggcacgtgccaccacacctggctaatttttgtatttttagtagagacggagtttcactgtgttggccaggctggtcttgaactcctgacctcgtgatccgcccatctcagcctcccaaagtgctgcgagtataggtgtgagccaccacacctggccttgaccacagcctgtcaaggcatgaacataagcaaccgtggtgaggaaagaggttctggtgagactcagcataatagtaattttggtaataccaagtagaaataatttagctcaaaactggttcccattatgaaccaaacttgaagatcagtatccagctcttttctccaaagttaacaaagtgcggaagggaatgagcacccccccgctactgaaaaaaaaatcacttggaatgtaaaatttaatagaggaagaaaggaaggagattagagaggaagatagttggatgccgaaacagggttcaagacttacccttgagcaaggggctgaaattggcttgactgataggacgtgtgatctgtgaggaggtttgaagtagtagtgtttaactacatgtagtttggagatgatcaggtgattgtaaacctcccactcctttgatttatttttaagtgcttgaaaggagaggtgagaaaggagcagtgatcaatgataactgtgcggttaactgacttttgggtatcagatggaaaagaaatactgtcattctacagcaacaggttcttcccaagtatttaagaaacactgtgttagttgggccgggtacagtgggtcacgcctgtaatcccagcactttggaaggccaaggcgggtggatcacctgaggtcaggagtttgagaccagcctggccaacatggtgaaaccctgcctctactaaaaatacaaaaaattagccgggcttggtggcacaggcttgtaatcccagctacttgggaggctgtggcaggagaatcgcttgaacccgggaggtggaggctgcagtgagctgagatgggaaaaaaagagaaacactgtgttacatgacccatcttctttttttgacatttagttcagaatttcacataccattaaggtaattaaagttttatcttcagttcccttttagactatggcgacatacctggagttcatccagcagaatgaagaacgggatggtgtgcgttttagttggaacgtgtggccttccagccggctggaggctacaagaatggttgtacccctggcttgtctccttactcctttgaaagaacgtccagacctacctcctgtacaatatgaacctgtgctttgcagcaggccaacttgtaaagctgttctcaacccactttggtatggattcttttgaaactggtaaaaatgataaatacaatatattatgaattttatgtgatgctcataaaagtcattaaatttgggcaggtcatcaaatttgtgataagtagtagatgatgagactcctaaacgattcttgtggtgagtagtaagtggtgaatatttgtagaaatctccctggcctgataattccagataaaattggaatcttacaggaatgaggtagaggtagagggagaggatttgtaattcactttttttttggctgataatcagtttgcttttggcttaactgtagactttattgattcctcttaaagtaatttcccagaagaattcgaaagcttagaccgtcttctcatgcttcccgggtacagtgatgctatatggcaaggagaagtagcaggcagaagaaattttaactgttaacaatttgttaagtgtaattttttttttttttgtgcctgagatagtgacctatttcttttaaatgtgggcattatttgaaatgatttttaaacaggtagagagtgtcataaaatttttatatgagggaacattttttacttcattctcattgcttttatttaatgtgcccatatgtgaatgcatagccactggttattaattttctaaatgtagaaaataagggaaaagtaactgaagcattatcttgaaccaatttgaggaagtgaaatgtgcttgcccaacttttcttaaaatgggctaagtcaggttaaaaatctagaagcattttcctgtgtgtgaaatatgcttttaatgttggaatttagtagtttcacatagccggacaataaagatgttagaaaaaaatcatgaagagtatgttaagataaaaggcaagagagaaataatgtataatttatataaatcatgacatttaaaaaattaggaaattggaaaagagaaaaagatttagtatttcttcactgtggctgtttgatggaaattgtggtgtacttagccagaattctaactgcggtgaacgttttgcatactcatacttatgcatacacatagaaacacttacttgtgtgatttactgaacttgaaatttacaaatgaacgctttctaccttaaaaataaaaattttattttaaaaataaaagtggtacctacttataatatttatctttctcacagtcaggttgattatcgagcaaaactttgggcctgtaatttctgttttcaaagaaatcaggtatgtgaattatttttaaaaaatgttatatgttttattttagttgtattatgaaaaaaattaagttaggttgaatttgtgtttacactggcagtgagcagtttctgctgaactcagggtgataacttttgttaagcacaatattgaatttgaacatttgtggtttattctgttgagtggttttcttgagtccttgtcatttgcttggggctggggagggggtgttcattgaattcccttttcttacacattttctgtaggcagtgaatctgtgacccaaagaaagcacctgtttttcatatttctcttgacttcagtatattctgattggatagtgtatattactgaattttcattttctgatctttctaacttttagagtccaggtatcagtgttgagcttcttttgatttaaaaattttaaaagtaccaaactagaaggagctcacaaatcacaagagagacttctctataaaagtaactgtgcggccaggcctagtggctcatgcctgtaatcccagcattttgggaggccgaggtgggtggatcatgaggtcaagaaatcgagaccattctggccaacatggtgaaaccccatctctactaaaaatacaaaaattaggccgggcgcggtgacttacgcctataatctcagcactttgggaggctgaggcgggcagatcatgaggtcaagagatcaagaccatcctggccaacatggtgaaatcccctctctactaaaaatacaaaaattagccaggagtggtggcagccacctgtagtcttagctactcaggaggctgaggcaggtgaatcgcttgaacccgggaggcggaggttgcagtgagccgagattgagccattgcactccagcctggcaacagagcaagactccgtctcaaaataaaataaaaaattagctggacatggtggtgcgcacttgtagtcccagctactcaggaggctgaagcaggagaatcgcttgaacccgggaggtggaggttgcagtgagctgagattgcgccactgcacttcagcctggcaacacagcaagagtgtcaaaaaaaaaaaaaaagtaactgtgcctgtagtggaaatgttctaaaagtggattgtggtaattattgcacaactgtacgttttctaaaaatcattgacttgtataattaaaatgagtgaattttatgttgcgtaaactatacctcaataaagttgttagaaaaaatttgtgtccagcatagtgtacactgttctaacagatcttaagctcttcacatgcattcgttcatatatttgatcataattacaattactcattctcagatacagcatataagtctagtgatgaagaggacagtgtacaattgatgactgaccataggttcggaaactataagcagatgtcatttaaaatatatcttcatgagagattcagaagtatatagaaatcttaaaagcatttctgctccctattacatttaggattaatgtctttgtttaatataatttattatagtaattctaaggcagggtagcatagtggctaaagagccagagatctgtagccagactgcctgggtttggctctcagatctaccacttatttcctgtgtaactttgggtaggtcacttaactgcctgtgcctcaacttccttgtctttaaaattaggatgatagtatagtatacctatagtcacttcatgagattattgtgagaattaaactgagttaatgagtataaaggacttagaacagtgcttgacacatggtaagtgccatataagtatttggtattattatgcttacctaagattgtcacctgccaatttataagtatgatctgcaagtctatgtgtcctaagtggaaataatcttttgtaaccttcctagctggacagtgtgggggttttctagctctaaatgaatgtagagctggaagacggagggatcagggtgatctccgtctcctttgctcccttctgtgcagctggctgactgcgtgggtgaacagggcctctccaggttgctgggaggtggctggtgtgtctgtagtcatagatcgagcttatccctgctgggagctgcagtcagtgggcagtcatggccaggatggggctagagtcttctgctggctctgactgagattcttgctggggctcgcaagctcagttgtacccttctctcccaaccagaggcccctaaagctgcctgtcagctcctcagcagcacttgcatttggtcactctgaggtcactggcctggagtgatcatctgctcactttggggagatgcacctcaacttgtatttttaatgtaaagctaaagactatttggattataagccaacccacaagctgtgaatttaaaacatttgcagagagttttaaaaacaaaagaaaatgcctgtggcattatgttgactggaaaaaacaagttccacattgtatatatgggatgttctcaactgtgcttaagtctggaaggaaatctgccaggaggttgacagtagctgcttctaggtgataggattttggggggcttttcctcctttgtttgcttctattttcctggacttgccaatttttctacattccgtatgtattactttattgataatagccaaaataataaacctaaataaagtctttggctttatttagactattaactattgatgagataggtgaaatctcagcctttaatttgcagggcaaaacttaagaaatggttttcatttgtgtgtttttggctaggcatggtggcttatgcctgtaatcccagcactttgggagactgaggggagaaaatcacttgaaaccaggagttcaagaccagcctgggcaacataaagtgtgcttttaaacatttagaagttacaatagcttaaaactgctctaaaaaatattttttaagaggacagaaatgatataaatataaggcagggttagaagttttaaatgctgatttttatgttttttaacgtgtcctgtattttgtgctttcagaataaatacatggtcattaccattttttttcttcttttttgagacagagtcttgctctgtttcccaggctggagtgcagtggcgcaatcatggctcactgcagccttaacctcctgggttcaagtgatcctcccacctcagccttctgagtagctgggactacaggtgtgagccaccacgcccaactaatgtttttacttcttgtatacagacagggtctcacagtgttgcccaagctagtctggagctcctgagctcaagtgttcctctcgtcttggcatcattatcatttttacacatggaaaataaaaagtgtaatatagttatgccaaccctaataaaactgtttccttcttttcagtttcctccagcttatggaggcatatctgaggtgaatcaacctgccgaattgatgccccagttttctacaattgagtacgtgatacaggtaatttctttgttgtgcatttaatgagcaatgttaaatactgaatttctcttgaaatcctttgtcttccatgtctcttacctgggcaggggacttaaagctgtgagggcagcaggatcctaacctttaggtttgatgtgtgtgcatctactggcattgttttcaagtcctgacattatagaaggctactaaaaaggtagaactgattaaattccaaacctgttctctgtagccttcttcatctcagttgatggtactccatcatctagttgtttagcttcagaaccttagacttatccttgacctctctctttcatgttccatatctaattcactggaaaatcccattggctctatatttgaaatttatccagaatccacccacttccccctccctactaccagctgccctgggccagccactccttcttacttgaatcttctaattgttctccctgatgttaccattgcctatttatacattattcttcacccagcagccacagtaattctttttttttttttttttacaaattgtatttattcatttattcagtgaggaaagtttgttttgctttcaaatattggcctttgtgaataatgcttcaatgaatatagctgttcaaataactgtttacccatatgttggaggtttgcatttctgctacattgtgttttattggaaaacttgtctgtctttatgccagaactaaactgtttttattactgtagctttgtaatgtgctttgaaattagaaaaggtgacattgtttcttttttttaaacatttttgggctcttttttttttctttttctttttttttttttcttctgagatggagtcttgctctgttgcccaggctggagtgcagtggcacgatctcggctcactgcaagctctgcctctcgggttcacgccattctcctacctcagcctcccgagtagctgggattacaggcgcctgccaccacgcccggctaatttttttaatatttttagtagagacggggtttcaccatgttagccaggatggtctcgttctcctgaccttgtgatccacccacctcggcttccgaaagtgctgggattacaggcgtgagccaccgcacccggccacatttttaggctctttattgtcctttgagattccgtataatttgttggttactttttctatttctaaaaaaaaaaaattgttaattgaaaagggattgcattgaatctgtagttcactaggcagcatgaacatcttcacaatattaagtcttacaacccttgaacatgagcatgctcaaaagtgagtttaatttccatatatatgttgatatttttgctttcttctgttattgatttctagttttattccatttttatcggaaataattatctcatgtgtccgtgtgaagagaccaccaaacaggctttgtgtgagcaacaaggctcttgatttcacctgggtgcaggcaggctgagtccgaaaaaggagtcagcaaagggtggtggattatcattagttcttataggttttgggataggcagtggagttacgagcaatgttttgtgggcaggaggtggatctcacaaagtacgttctcaagggtggggagaattacaaagacccttcttaagggtgggggagattacaaagtacattgatcagttagggtggggcagaaacaaatcacaggtggaatgtcatcagttaaggctattttcacttcttttgtgaattttcagttgcttcaggccatctggatgtatacgtgcaggtcataggggatatgatggcttggcttgggttcagaggcctgacattcctgtgttgttatattaataagaaaagcaaaacaaaatagtgaagtgttggagcagtgaaaaaattttgggggtgatatggagagattaatgggcgatgtttctcaggactgcttctagcgggattaggggcagcgtgggaacctacagtgggagagattcaactgaagaaagattttggcgtaaggggtgatgttgtggggttgttagaaggagcatttgtcgtatagaattattggtgatggcctggatgtggttttctatgaattgagaaactaaatgaaagacacaaggtccaaataagagaaggagaaaaacaggtattagaggactaagaattgggaggacccaggacatccaattagagagtgtccaagggagttcagtgtaattacttgtttggttggtgagtttttgggctctattcttgacagagtcctttttgttaagttggaggctgagcttggtgaggtgtgtttttaaaagaccattagtttgtcctaccgttcctgaagattgaggatggtaaggggtatgaagttttcactgaataccaagagcctgaaaaactgtttgggtgatttgactaataaaggctggtccgttatcggactgtatagaggtgggaaggccaaaccaaggaattatgtctgacaaaagggaaaaaatgactgcagtggccttctcagaccctgtgggaaaggcctctacccatccagtgaaagtgtctacctagaccaagaggtattttagtttcctgactcagggcatgtgagtaaagtcaatttgccagtcccgagcaggggcaaatccctgagcttgatgtgtaaggaagggagggggcctcaacaatccctgaggagtagtagaatagcagatggaacactgagaagtgatttccttgaggatagatttccacgatggaaaggaaatgagaggttttaagaggcaggctaatggcttgtaacctacatggaagagattatgaaatgacaacagaatagaatgggcctgtgaggctggaaggaggtttttttttttttttttttttttgtctaagaaccatctgccttgagtggagagggattgataggtggaaacttcagtgggagagtaaacaggagtgaccaatgagaaggagaaaaactggccatgagggacagaagttggaatgctagctgcttctttagctaccttatcagcagaagcgttgccctgggtgatgggatctgatgccttttggtggcccttgcagtgtatgactcctgcttcctttggaagtaaagcagcctttagaagagtttttattaaagagacattaatgatggaggacccttgtgtagtgattttctgcctatataacagcatggtggtgcaggatatggaaggcatatttagagtcagtataattattgacacgtaattcctttgcaagagtgagggctcaagttaaggcaatgagttcagcttgctgagaggtagtggagccgggcagagtggtagcctcaatgatagatgtggaagatactatggcatagcctgcctttgctggtgtgtggcgattaggcctggtggaactgccatcaataaaccaggtgtgatcagggtgaggaataggaaagaaggaaatatgaggaaatggagtgaatgtcaggtggatcagagagatacagtcatgtgggtcaggtgtggtatcaggaataatgtgggaggccggattgaagtgcgggccaggaacaatggtaactgtgggagactcaacaaagagtgagtacagctgaaggagccggggagcagaaagtatatgtgtcaggtgtgaggaagaaaatagattttcaaagttatgagaactgtagagagtgagttgagcatagtttgtgattttgagggtctctaaaagtattagggcggcagcagctgccgcacggagacatgatggccagcctaaaacagtaaggtcaagttgtttggacaaaaaggctacagtgcgcggtcccgttccttgtgtaagaattccgactgtacagctctgcacttaggctgtgtgtaatgaaaagggttgggatgagttagggagactagtgtgggggcagtctctaaagctgacttcaaggaacggaaagaggagtggggaaaggatttaggatctgtggggtcagctaggtttgcttttgtgaattaatataatggtttagtcaggatggtaaaactaggtatccaaaggcagaagtacctaaccatgcctaggaaggaaaggagttgttgttttgtagaagagattggggtttgggagattagtcagacatggtcagcagggagagcacgggtgttttcatgaagaattatgccgagataggtaatagatgaggaagaaatttgagcttgactgaagtaatgggggctgtccgcgaagccttgcggcagtagagcccaggtaatttgctgagcctgatgggtgtcagggtcagtccaagtgaaagcaaagagaggctgggatgaagggtgcaaaggaatagtaaagaaagcatgtttgagatccagaacagaataatgagttgtggagggaggtattgaggataggagagtatatgggtttggcaccaaggggtggataggcaaaacaatttggttgataaggcacagatcctgaactaacctataaggcttgtccagtttttggacaagtaaaatgggattgtaaggagagtttataggctttaaaaggccatgctataacaagcgagtgataacaggctttaatccatttaaagcatgccgtgggatgggatattggcattgagcggggtaagagtgattaggttttaatgggatagtaatgggcgtgtgatcggttgccagagagagtggaggtatcccatacttgtgggttaaggttggggggtacaagaggaggatgcgaaggaggctttgaactggggaaaagagcgggagtgaggtgtggctgtagcctgggaatagtcagggaagcagataatttagttaaaatgtctcgacctaataagggagccgggcaggtgaggataactaaaaaggagtgcattaaagaatgttgtccaagttggcaccagagttggggagttttaagaggtttagcagcctggccgtcaatacccacaacggttatggaggcaagggaaacaggcccttgaaaagaaggtaatgtggagtgggtagcctctgtactgattaagaaggcgacggacttactctccactgtaagagttacccaaagctcggcgtccgtgatggtctaggtggcttctgaggcgatcaggcagcgtccgtcttcagccactaagctgagaagatctgggaaggagtcagagagccttgggccagagttccaggggctctgggagtggctgcttggtgagttgaacagtccgattttcagtggggtcccgcacagatgggacacggcttaggaagaatcccgggctgcgggcattccttggtccagtggccagatttccggcacttgaagcaagctcctgcgggaggaggttctggaggaacccctggcagctgcggtttaggcgtttggagttcttgtgtgctggagatgtggctggggtttgtctcacagtggaggcaatgaattgcaactcagaaatacattgttacttggctgcctctactctattattgtacaccttgaaggcgaggttaattaagtcctgttgtggggtttaagggctggaatctaatttttggagctttttctaatgtcaggagtggattgggtaataaaatgcatattgagaataagacggccttcctctgggggccttcctctggggtctaggacagtaaagcgtctaagggtttttgccaaacgggccattaactgggctgggtttttatatctgatgaaaaagagcctaaatgctaactgatttgggagaggtcagataaagaaaaaaggagcattaaacttgactatgcctttagctccagccacctctttaagaggaaattgttgggcaagtggggagggctagtcgtggaacgaaatggtaagccaggccgggtgtgaggaggggaggtgatagaaagattatagggtgggggagcagaggctgagaaagaattgggacctagcttggcctggtgaggagcaacctggggagaaggggagaggtcagatgagtccgtagaaaaggattaaaaggacttaagagcttggggtggagactgaaggaacagacaggagagaaagaagaaagatttgggacgagtcgcattgggagcagagactagggagggaccaatgtgtaaaagaatgcctggacgtcaggcacctcagaccatttgcccattttacgacaaggattatttagatcttgtaggatggagaaatcaaaagtgccgttttctggccatttagaatcattgtcgagtttgtactggggccaagtggtgtggcagaagaaaataagacacttagattttaggtcagatgagagttgaagaggttttaagttcttgagaacacaggctaagggagaagaagggaatggagggcggaagtttgcacatagtgaaggaggtaagtttaaagagaagggtagagacacggagtagggggtggggagcagccatgggctgcaatgtgggtgagcagccaaagcaggagtccctacaattgacttgtcaccaagggaatgtgggtgaatgaccaaggcaggcatccctgcagagatcagacgccaatggaatgtgggtgaataatcaggcaggcgtccccacaatgattaaacaccaagggaaggctgtcttcctgagtccgtgaccggcgcgttttgggtccacggataaaaggtgtctcctttgtctctactagagaggaaaaagaactggaattggaaggacagggagattgaagggtagcaagagaggctggagaagagagtgaaaagaccacttacccgatttgaaattggtgaaatattccctgggctagttggtccgaggacctgaggtcgtaggcggatctcttcacggggtgagggtgaggacaggggactggtctcttgaaggagtccctctgacccgggtcttcggcaccaaatatctcacgtgtccgtgtgaagaaaccaccaaacaggctttgtgtgagcaacaagctgttattttacctgggtgcaggcgggctgagtccaaaaaaggaggcagcccagagtaattctttaaaaacaaatcggccgggcgtggtggctcacacacgtaatcccagcactttgaggggctgaggcggggggatcacaaagtcaggagatcgaaaccatcctggctaacacagtgaaaccccttttctactaaaaatacaaaaaaaatttaaaaattagccgggcgtggtggtgggcacctatagtcccagctacttgggaggctgaggcaggagaatagcgtgaacccaggaggtggaacttgcagtgagccgagatcgcgccactgcactccagcctgggtgacagagcgagactccgtctcaaaaaaaaaagaaaaaaaaatcatgttacttctctgttcagaaaaccccactggagaaagtggctttcttttacccagggtaaaagacagttttcaaagccccacgtgttaccactccaaccccagtatctgctagtgtcctcgttcagcccagtgggcctctttgactctcctcaaatgtgctaacactcctgcttgaggacctctgctgtagcttttccctgaggctggagctctcccctgtatctgtggtgctccttccctctcttccctcaggctttgctcaaacattactttctttttctttctctttctttgtttctttcctttcttttttttttttttttctttttttagacagagccttgctctgtcacccaggctggagtgcaatggcacgatctcagctcactgcaacctctgcctcctgggttcaagcaattctcctgcctcagcctcccaagtagctgggattacaggtgaaccccactacgcctggctaatttttgtatttttagtacagatagggtttcaccatgttggccagggtggtcttgaactcctgacctcgtgatccacctgtcttggcctctcaaagtgttgggattcaggcatgagccactgtgcccggccctctttttcttttttttttttttaagatggggtcttgctctcttgtccaggctggtatgtagtggtacaaccatagcttactgcagcctcaaattcctgggcttaagggatcctcctgcctccgcctcctgagtagctgggaccttaggcatatgccatcatccccaactaatttttaaatttttatatttttttttgttagagacggggtctcgccatgttggcagcctggtcttgaactcctgtgcttaagcaatcctcccatcttagcctcccaaagtgctgggattacaggcatgaacccggctcatatgctactttctaaatgaggctgccctgatttctctgtttaacagttgactctgccctctgcctctcctcctggtgtttgcagtcccccttaacctctccattccagaaagtttgctccttgaggcaggtagaagtctttgttttttctgttcactgtgtgtcccaggacctgaaacaatgtctagcatgtaggaagtattaaaaaatgttggcaaagttgttggatacaaatagtttttatctttagtttgatttaataaaatctaagtcatttaataagttagagctttgtatagatgtccttatctcctaaaactaaatatagatgaagacttacaattttcatacctaatttgccttaaaaagtgctggttaagtctatttgtatattgatcattatgctgtttttctttgcccaaagcgaggtgctcagtcccctctgatctttctctatgtggttgacacatgcctggaggaagatgaccttcaagcactcaaagagtccctgcagatgtccctgagtcttcttcctccagatgctctggtgggtctgatcacatttggaaggatggtgcaggttcatgagctaagctgtgaaggaatctccaaaagttatgtcttccgagggaccaaggatttaactgcaaagcaaatacaggtttgtaccttacttgtacaggagcagaaacaaggacttttttttaaaagagactggggtctctttaaaagagcctgtagcccaggctggagttcagtggtgtgatcattgctcaatggctcaagccattggcccacctcagcctcatgagtaggtgggactagaggcacatgccaccacacccagctgaggacatttcttaaaaattagtcattcacttttagtgtcattggaaatgaatctttttggcttttttttttttaaggatatgttgggcctgaccaagccagccatgcccatgcagcaagcacgacctgcacaaccacaggagcacccttttgcttcaagcaggtgagagcccaacatggagtgttacacgtattgtgatggacatgcagatgatccatgggagtaagggaagaaaaatattagaatttgtattttcttattattagagaaaaagataaatgattaagcctaatcaatattcagtgttttgtcaaaaaggtttggagaccactgtgctcaattgctgtttttagacattccacatctgatgtcctttttgatgcttaagtaaaactggaaaaactgaaaagacttctttcatgtgtcctcaaacatacttatgaccgggtattcacttgactcagcccattgagtgcctagactgagctaacaagctcgataaaatgcattgcccgacatgctgaagacaacctcttactttcaaggcttaagagaagcacagattagaatgatgaggaatgatgaagattgtccacataaatggacctcacatagactgaactcatgttaggcatgtccttaggatttttttgctgtctaaaaattaattaaactgaattgctccttttccagacaatttttttttccgtgcaacataagtaaattgctaagtactgggctttatattcctcaataaaactgctttaaattgttttgtgttagtagagagatagctttgaagaaaaaaattaccagtcagttactactctgaataattatcttgaagagcagtaattatgtggcacctagtgttgaagaccagagtactttattcaatctgggttgatgtgtctgttaaaatcttgcagatttctgcagcctgttcacaagattgatatgaacctcactgatcttcttggggagctacagagggacccatggccagtaactcaggggaagagacctttgcgatccactggtgtggctttgtccattgctgttggcttgctggaggtaatttaaaatttaccaggacctctcaaatcatacaaatgtgctctcagaaaatatatttgttggctttgtttgaaaatcacttgtgatctaagtcaaccgtctgtgttaatgtatcagaaagcatttgaggcatcattatcattcacgttgagggagcccctcaacattttgaaaatgccaaaagttttcattgaaaaactaagaattagagcaatagggagcactcaaacagcgaattaataaaactgtgcaaacccataaggttggaagaagacaagtgctgcttttctgcattatcatctgtattattctgcattatcaccactttttaggacagctggagagaatgcatctttggagtatttctattgggaaactgaaaccatactaaaaggtgaggctgtatacttctaacatgctgccattcgctattttagggcacttttccaaacacaggagccaggatcatgctgtttactggaggtccccctacccaagggcctggcatggtggttggagatgaattaaagattcctattcgttcttggcatgatattgagaaagataatgcacgattcatgaaaaaggcaaccaaggtaggtgctcttgggtatgggctgtaattctgaaagcccattgtcaggtttgggctgctctggagtgacagctactttgccaaggtcatgtgtcatggtcagcaagacgctgtttcagagacagttttccaatcttagctgctgttaaattattgctcctactttcagaccttaattagagtgggtggccttaaaactactcaaagggttttgagaatgaaaactatatttttattttattcagatatttttgaaaatgatttccaggccagtcccggtggctcacggctgtaatcccagcgctttgggaggccgaggctggcagatcacttcaggtcaggagttcaagaccagcctagccaacgtggtgaaaccatatctctactaaaaatacaaaatttaagccaggagtggtgactcacgcctgtagtcccagcactttgggatgccaaggtgggcggatcacttgaggtcaggagttcgagacgagtcttgccaacatggcgaaacgcctgtctgtactaaaaatacaaaaattagctgggcatggtggcatgtgcctgtaatttcagctactcgggaggctgaggcacgagaatccgttgaacctgggaggcagaggttgcagtgagctgagatcgtgccactgcactccagcctgggtgacggagtgagactgtctcaaaaagtaaataaaaataaaaatacaaaaatttgctggggatggtggcgcacgcttttaatcccagctacttgggaggctgaggcaggatgatcacttgaacccgggaggtggagatcgcaccactgcactctagcctgggcaacagagagagactctgtcacaaaaagagaaaagaaaatgatttacatgtttttatatttgattacctccttcggtaattcaggcataccttgggaataatgtcactgtttcctaaagatagctttcctctcttcacagcactatgagatgcttgctaatcgaacagctgcaaatggtcactgcattgatatttatgcttgtgcccttgatcaaactggacttttggagatgaagtgttgtgcaaatcttactgggtatgttgacagtgaaaacctgggcagagtgacagtgttattttaaggaaagagaaattagtgatggagccataggaatgggcaaggccaactcagagaagctttcaggtagctctgggctatggtttcagtgactggggagggcctgtgggctccttggagagggaagtagtgattagtaggagggctcaagagttcactacaaataagtcgtttcagagtaacttatttcttccttagagttgttaacacttttacagagaccaggccaagaaagcaagcagcatggactatctggccttcatcagggcacttccttttgagaattggggaaaacagggtctgaatgctgaaacaactaggataaacctggctaagtggccatactttgtgactaactccaagtgcactcagcctagaggttgtactgactcaaagcctgagtcagtattgtattcacaggccagagtgtggagcagtggttctcaacatgtggtggtgtccagatttgcagccttaggggctcctgggaactgattggaattgtatatttctaggccttacccagacctcctgaatcggaaaccccgggaatgcagctctctaggagattctagggcacatgaaagtgtaggaaccactgatgagcactggtctgcagctgcctacgtattgttatcaccaggggaactttaaaagctacactttctttaggtcttgtcctcagagattctaatttaattagcatgaggtgcagcctgggcatcagcattttaaaagtttctcccgtgattctaacatagagccgagtttgagaaccatgcagcatcttgagcctcactctagacctgaatcagaacctgcatttgaacaatatcccaggtgatttgcatgcacagaagtttgagaagcatcatagagctgtggaatgggcctgagagtctgcatttctaacaaccccacaggtgatgctgctggtccccagtgagtaaaaggaataaaaggtagaaccagaatcagttggagttgtcctagagagcagcagatgagttaggtgatagaattagggtcccaaatgatactgatgtagctatctcagtaatccacatttaatagtatgaattcctaccacggccttccaggagttctgactcggaatgtccatagaaaagctttagtgtatttgtgaacatcccttagattgtatgctagtttgtgtgaattttttctgtgaagagttaccatctgttgcacacatgtgttagtatagctcaaggtgagccaacagtgtgggatgacttccagcaaaggcaaggtgattccaggctgtgctataggagaagattatcttcagggaagaccatattcttggtttctttggtgctagtcacaccttatccaaatacattgttttctgttctgaacattgcaatttcaaggggcaataggagatgaattggagatgtttgaagaagagcagtggtggagagtcctggaaactgtcatgtgaggaatgattgaagtagctggaaaagattaagctgaagacacatgggggtgtgagaactgtattcagcagttgagggacttccctgtgaaggaatctgatttgttctgtatgtgaccaaagagtggaactagaaccaaaccagtgggtggaagctgctggcaaatgaaatttcactcaatatcaagaagggcctttcttaacagagctgttcaaacacagaatggacagcttggggaggaagctcccaatgctggaggagttcaagcctagtctggatgtaacttggcaggtattttgcagagggtttggttgagtgttagtattagagttgtgtgaatgtcacagaaaacccacaataagtttatttctctggcggtaggcagtccggggctggtatgttgctttcgtcatcattacgggctgaggctcctactaagctgctctaccaccattcatatgccatctgtggctcaagacagttgctggagctctagccatttacagcagcaggaaggaggaaaggtcagagaaggattgctcttcctggaggaacacactccacatataaaggacacagcaatagtcagaacgcacatgccaacagaggcacatggccataggcaaggcaggctggaaaatgtcattgttccaggaaactaaggaagaggtagatatttggtgccaaagagctgacagacggttcaggcactctgagatggccggaccagatgatctttcttgtgttcttcaagattctgagatcttgttttatgaatgacgtttggaggcataacttgcgtcaagctgtgcttttctgtccaaatgcatgaaatgctgacattttgcacaatgttttcctctaacttcagtaagggattaatattaatactcatgagttggaaaacataattcttgtaaagtcaagaattcagtattttgaggcagtaaattaacctgaaaaggatttcccacaggcctgggtattttcccataccaaagaactgtgagaggaattagagctgttcttaaggcttctgtttaatgctttagaagtagtttctttgccaagtatgaatttaacatgctgtttttatttttttaatttattttattatttatttacttatttattaattttttttttgtttgagaaacagtcttgctctgtcgcccaggctggagtgcagtggtccgatcttggttcgctgcaacctctgcctcctgggttcaagtgattctcctgcctcagcctcctgagtagctgggattgtggctactaatctttgtgtttttagcagagatggggtttcacgatgttggctaggctggtcttgaactcctgaccgcaagtgatccgccctccttggcctcccaaagtgctgggattacaggcgtgagccactgtgcctggcctgtttttttatatttaaattaatcagtggctcttttggggacctggtttctttttttctttaaattatttttgtaaatactgagggagcatctgaatggctttcaatcttcctaatattcacttgatttttttcttcttacctagaggctacatggtaatgggagattctttcaacacttctctcttcaagcagacattccaaagaatctttactaaagattttaatggagatttccgaatggcatttggtgctactttggacgtaaaggtacggtaaacttttttttttttttatgtggactcactgtactgcccaggctggtctcaaactcctggtctcaggcaattttcccgcctcagcgtcctaaagtgctgggattatgaggcatgagccactgtacctggccatacttttaaaacttcaatgaaattatagtgttcttactttttcaatcaatatccagacttctggcaacctccacctgctggacatgggcatgtaaaagccaattaaaaggatctcaaccaaatggctattaaaagcatgttattcactttatccctttgcttcttgaggatgacctatatatttatttatgttctaagtaacaagctgcctggttcaccctcaggctctgctccaccctgcttcaaggcagtaggagatagaagaggaagtagggtgggtgttatgagcagcactgtggcctgaggacaggggcagccacacggtggtctgcatccacccagccatcagcatggctcactgcattgcacagagacgtggttatgtttaatgtcttcctgaagaatagccaaagtactctaaaatagcactgggccaggcatggtggctcatgcttgtaatcccagcactttggcaggccgaggtgggcggatcacctgaggttgggagttcgagaccagcctgaccaacagggagaaaccccatctctcctaaaaatacaaaactagccgggcgtggtggcacatgcctgtagccccagctacttgggaggctgaggcaggagaatggcttgtacgtaggaggcggaggttgcggtgagccaaaatcctgccattgcactccagctgtggcaacgagtgaaactgtctcaaaaaaaaaaaaaaaaaaagacagcattttgagattttttttttcccatgtagggactcatggccctgatacagctgattctaagtcattgagaaagcattaaaagagggtgttaggccaggcacggtggctcatgtctgtaatcccagcactttgggaggccaaggtggggtgattgcatgagctttggaattacagaccagcctgggcaacatagcaagaccctgtgtctacaaatgatttaaaaaaaaaaaaattaacctcgtgtggtggtgcacacctgtggttccagctactcaggaggctgaggcgggaaaatcacatgtgcccaggagtttgaggctgcagtgagctatgatcatgccactgcactcagcctgggcaacagagttgccagttggcggggcaggtcaggggccgtcattagaagatacgattggaattattacttggagaattagagataattattaaatcatctaggttagactttaaaccataatcttaaatgcttgagggttttcttttaaagatggacttttgaaatgaattcacattttaaaaatctaagtatgttggccttgtcgttatattggagttcatgaattaagtatttttaaagcaacacaaaacagtatgttctctgattaggtatatgcaaataattatggatatacatgaatgtgaatatattcatacaagggattggaaaagaatgtagtattgttagaattgttatctacatgtacagtaatttccaagtttaaaaagtaagttgtgagagttgaaaatgctcatgtttcaagtgtttctaagggtggattttattaaagttctaatcacagtggctgaggaaaagtttgtaggactaagcagttatgatccctgtggagttttctcttggcagaatagtagtgttatattttccctctaagctttcattgtggccatgatgacagcagggtggattgaagtgatctttaactttacactgtcacatatttgttatagacctctcgggaactgaagattgcaggagccattggtccatgcgtatctctgaatgtgaaaggaccgtgtgtgtcagaaaatgtaaggaaaacaactccatcaccctcacctcctgccccggatttaacccgtcagaagtgtcagagcatgatgatctcacatgtgtcacctgttggatgtgtctgcagtgacaggagaagggctaaccctcactgatgactatactcggagaggtggtgttattccatctgttcatccaaagggttagagagaaggaaactgaggcccagaaaggttcagtatcttgctcagggtcagaactgacatgaaggagttagagcccaggtgcccctgactccaccacccatggtcgttgtgccaaagccacggcatgctgttcagcacaaggcaaacattcagcacagtccttccagagtaagcctattgctcattgcccttagaggtgatacgtttgtctcactcagctaataacaagccttttacaacagagaccaccatgagttggtgtggaagtgggtgacactgctgtgtgtgcagacatctgttttctctagtaatagtttttgagaacaatttagttatcatttgagatgagcggctttgcttattgtccacttcctctgattatactttacttgctaggaggcaaaccattcggtttggcaaggcctctctaaggtggtcctgggctggggttacacagtcatgttcttccctcattgtcaccatcaatgggagggtagaccatagagccagatgtggatccaaggtgcaggtttacaccccgcacctggcccgagcaaaggacttatttgctctgtgattcagtatccttatctggcaaatggggataataacagtgcccactctacagcattgttaggaggtttaaatgagttggttcaggtgaagcagttagtgcctggcacactggaagtgtgggtcttctttcatgttgtcagcaacaaacgttcttgggtgaccacataaattaaacttttgttgagcttggcagaggcaaggtgatttgagagcacattcctgtagccttctgagtgaggcagattgctgccctaaagcccatctgatgagtcattcattacccccagagtactaaggggcttgtacccctatttcctggcaaggctttggaaggctgccttgttataaaatatttttcatggacttaaaatctgcctgctgaaggcttcttgaagtagtttaagaaggtatttttatgaattagtacaaactaattaatatttctagtagaattcagccatgaaagttttgtttggggaatgaggatgcaaagaataggaaaatacaattttcagacatactgagtgatgaatttctatacctaccatttagtcattgattgttaacattttgccataattgctctgttgtcttgtttgccacatttgctttatctgattttcatttatttgccacatttgatttatcaactttttttttgccgacctttgaaaataatttgcagatatcatgacagtccttaagcacgtcagtatgcatcttctaaaaataacgatgttctcctaccacgatgtcattatcaaacttaagaaaataataatttcctaatatctagttcatatttttttcctaatttccccccaaatgccctttgtagctgtttttaccccaactggcattgcatttgatattacagcctttgtaaagtgagagtctgggttaaaggtgtgtttacattcaggcaaagcctttttgccaagcattgttcctgggcagtgtgtactttatgcttgtgtcacatccagaggcactatgtctgctgtcccgtgttacatgtgctgagttagatcgcttggtgatggtggtaactgccccactgcctttctactgtaagggaacacttccccctttgccattagcaggcaatcttttgaatgagagtgtgtagcacaatatgaaactcttgtttgccaacagcctaatggtttttagcatccattgatcttcatgcaaatcagtttatttctttggggattataaaatggtcatttcctaattgtctttatcgtttctccaataaaggcatctaaagagcaaatgtttaagtaaggaatttgtgtatcagtgagaaaatgatattttggagctctagaggagccgtcctgggtctggtgcttagaatggggttagcaaggcaagaaggggaggcatgaatgctcctttgacttctttgcctttttcctgagcacagctcttcaccttccagcagataataaacacctgcttcctttagaaaaggccactacaaggaaggtgaacccccgtgaatccatctatcttattatctagcttagggagtactgacagaacagagtgcaccctctccgctctccaccttagagctgctgtgtgatttcaccttaagggtctttcttaagagtctgacttgattgattctttgtggatttcagcgttatataccatgtagagacaccccctgacacacccacccccccccacacacacgtagtatatgtgtaaacccggaacgatgggtcacacctgtaatcccaacactttgggaggctgaggcgggaggattgcttgaacccaggaggtcgaggctgcagtgagctgtgattgtgtcacggcactccagcctgggcaacagagtgagagaccatctcaaaataaataaacataaataatatatatgtatagtatatatgatgtaataaaaattggtcagaatgttaatataaaaagcttaattttaaagtgtaaatgtaaatgttaagccttcatctgttctcttttcaggagaaggttttatttcaacttaaatgttctcctaaaagaagatactctaagtagcctgccctactcagtcagtacttttcattagcaattaaccacagggatggttttctggttttgtttttcaaattcctcttcccacccccaggagcttggtgttggtggcacgagtcagtggaaaatctgtggcctagatcctacatctacacttggcatctattttgaagttgtcaatcaggtgagttggatttcttcacatgtcttcatgtcttagtgtcctgttttgtgatttatctcaaaccagtggtctctggttactttcttcacaaaccaatattccttgggtattgtattaggcctgatgatagtctggcatgaccttttcttatttattccttcaagggtttagtcggagtcaggcaacaaattacttttgtccttttattgttgaactgataaggtcattagaagtgtaatagattttaccagtcatcataatgttggtgaattttttagtgcatcggttctttccctaatattttattatgaaaaattccaaacatacagaaaaattgaaagaattgtacggtgaacacgtactacctaggtgaacccatcaacttgattctgtaattaacattttactctactggcataccttggaaatactgtgggttcagttccagactaccacaataaagtgaatattgcaataaagcaagtcacatgaatattttggtttcctattgcatataaaagttatgtttgcactatagtatgttaagtgttaaatagcattatgtctttgaaaacattgttcattcttggattaaaaaaatactttacagttgacccttgagtagtgttggggtgctgacactgcatagttaaaaatccacatataacggccgggtgctgtggctcacgcctgtaatcccagcactttgggaggccgaggcgggcggatcatgaggtcaggagatcgagaccatcctggctaatatggtgaaaccctgtctctactaaaaatacaaaaatttagccaggtgtgttggtgggtgcctgtagtcccagctacttgggaggctgaggcaggagaatggcgtgaacccaggaggcagagcttgcagtgagccaagatcgtgccactgcactccagcctgggcaacagagcgagactccatctcaaaaaaaaaaaaaaatccacatataactttaactcccccaaaacttaactactagtagtccactgttgactgggaacctgaccgataacagttgattaacacatattttgtaagtaatatatattatgtcctgtattcttacaataaagtaagctagagaaaagagaatgttattaagaaaatcataagggaaggaaagtgtatttactatttgttaagtggaaatgaacatcacaaagtcttcatactctcatcttcatgttcagtaggctgaggaggaggaggaagaggagggtttggtcttgcagtcttgggtggcagaggcagaagaaaatccacatataagtggacctgtacagttcaaacctgtgttactcatcattaaaaagtcaggaaacaacaggtgctggagaggatgtggagaaataggaacacttttacactgttggtggactgtaaactagttcaatccttgtggaagtcagtgtggcgattcctcagggatctagaactagaaataccatttgacccagccatcccattactgggtatatacccaaaggactataaatcatgctgctataaagacacatgcacacgtatgtttattgtggctctattcacaatagtaaagacttggaaccaacccaaatgtccaacaatgatagactggattaagaaaatgtggcacatatacaccatggaatactatgcagccataaaaaacgatgagttcatgtcctttgtagggacatggatgaaattggaaatcatcattctcagtaaactatcgcaaggacaaaaaaacaccgcatgttctcactcataggtgggaattggacattgagaacacatggacacaggaaggggaacatcacactctggggactgttgtggggtgggggaaggggggaggaataacattaggagatataactaatgctaaatgatgagttaatgggtacagcacaccagcatggcacatgtatacatatgtaactaacctgcacattgtgcacatgtaccctaaaacttaaagtataataataataaaaaataaataaataaataaaaaaacctgtgttgctcaagggtcaactatattgctcaaaaatgttaatgctcatctgatcctttagtgagtcatactcttttgctggtggaaggtcttacattgatgttgttggctgctgactgatcaggttagtagttgctgaaggctgagtggctgtggcagtttcttctctttttgttttttttttaattaagacaaagtcttgttctatcacccaggcacgatctatcacccaggcacggtcttggctcactgcaacctccacctcacaggttcaagccattctcccaccccagcctcccgagtagctaggcttacaggtgccagccaccatgtctggctagtttttgtatttttagcagagacaaggttttgccacaatggccaggctggtcttgaactgacctcaagtgatctgcctgcctcagctcccaaagtgttggaattacaggtgtgagctaccacgccccacctgggaatttcttttttttttttttttttgagacggggtctcgctctgtaccccaggctggagtgcagtggcatgatcttggctcactgcaagcttcgcctcctgggttcacgccattctcctgcctcagcctcccgagtagctgggactacaggcacccgccaccacgcccagctaattttttttttgtatttttagtagagacggggtttcaccctgttagccaggatggtctcgatctcctgacctcgtgatccgcacgtctctgccttccaaagtgctgggattacaggcgtgagccaccatgcctggccggaatttcttgaaataaggcaacaatgaaatttgctgcatcagtcgactcttccttccaggaaagatttctctgtagcatgcagtgttgtttgatagctttttacccacagtagaacttctttaaaaaatggaatcaattctcttaaactttgctgctgctttatcaactaagtttatgtaatattgtaaatcttgtcatttcaacagtgtcacagcatctgcatgaggagtagattccatctcaacaaatgactttctttgcttatgcataagaagcaactccatatccattaaagttttatcatgaaattgtagcaattcagtcccatcttcaggatccgcttcttcatctttttaattaaaaaaaataggccgggtgtgatggctcccgcctgtaatcccagcattttgggagattgaggcaggtggatcacgaggtcaggagttcgagaccagcctgaacaacatggtgaaaccccgtctctactaaaaatacaaaaaaaaaaaaaattagccacgcatcgtggtgcacacctataatcccagctactcaggaggctgaggcaggagaattgcttaaaccaagtgatggaggttgcagtgagccgagattgcgccactgcactccagcctgggagacagagcaagactccgtctaaaaaaaaaaaaaggccgggtgcggtggctcacgcctgtaatcccagcactttgggaggccagggcaggtggatcacgaggtcaagagattgagaccatcctggctaacatggtgaaaccccatctctactaaaaatacaaaaaacaaaattagctgggtgtggtggcgggtgcctatagtcccagctacttgggagactgaggcaggagaatggcatgaacccaggaggcggaggttgcagtgagccaagattgcgccactgcactccagcctgggcgacagagcaagactccgtctcaaaaaaaaaaaaaaaaaaagagatggggtctctctttgttgcccagactggtctcaaactcctgggcttaagccaccttggcctcccaaagtgctgggattacaggcgtgagccaccacacccagccaggatccactttttttttttttttttgagatggagtcttgctctgttgctcaggctggagtgcagtggcaccatctcagctcactgcaacctctgcctcccggggtcaagcaattctgctgcctcagcctcccgagtagctgggattacaggtgtctgccaccacacccacctaatttttgtatttttagtagagacggggtttcaccgtgttgtcctggctggtcttgaactcccgacctcaggtgatccgcctgccttggcctccaaagtgctgggattacaggcgtaagccactatgcccagctgaggatccacttctaattctagttatcttgctccttccaccacatcttcagtgacttcctccactgaagtctcaaacccctcaaaattataagaactggagtaaacttccaaactcctgtgaaagttgatattttgacctcttcccatgaatgatgagtgtttcaatgacatgtagaatggtgaatccttttcagaagattcttcattttctttgcccagatccatcccaggaatcactaggtatggcagttatagtcttatgaaatgtgtttcttaaatttaagacttgaaagtcaaaatttctccttgattcatgggatgcagaacggatgttgtgttagcaggcatgaaaacgtttatctcctttatatctccgtcagagctcttgagtgaccaggtgcattgtcagtgagcagtaatattttgaaaggagtcttttttttcctgagcagcaggtctcaacagtgggctttaaatatttagtaattgctgtacacagatgtgctgtcatccaggctttgttgttccttttgtagagcacaggaagcgtagattgagcacaattcttaagagtcctaggatacttggaatggtaaatgagcattggcttcaacttaaagtcaccagatgcccaggtatggtggctcacacctgtaatcccagcactttgggaggccaaggtgggtggattgcttgatctcaggagctcaagaccagcctgggcaatgctgtgaggcctcatctctaccaaaaatacagaaattagccagatgtggtggtgtacgcctgtagtcccaactacctgggaagctgaggtgggagaatctcttgagcctgggaagccgaggttgcagtgagctgagatcatgccattccactccagcctgggtgacagagcaagaacctgtcttagaaaaaccaaatagagtcaccagctgcattagatcctaacaagagagtcaacctgccctttgaagctttaaagccaggcattgacttctctctagctatgagaatcctagatagcatcttcttccaactacactgaaaatctgtggtttagtgtagccaccaccttcatcagtgatcttagctaatctgaataacttgcagcagtttctacatcagcacatgctgcttcaccttgtgccattatgttatggagatggcttctttccctaaacctcaggaaccaacctctgccagcttccagctttctcctgcagcttccttacctctctccaccttcataaattgaagagagttgggaccttgctctggattaggccctggcttaagggaatgttgtatctggtttgattttctattcagactactaaaacattctccacatcagcaataaggctgtttcactttcttatcattcacgtgttcacttttaatttccttcaagaactttttctttgcattcacagcttggcagttttggggcaaaaggcctagctttcagctatcttggctttcaacataccttccctactaagattaatgagttttagcttttgatttaaaatgagagatgtgtgactcttcctttcacttgaacacttagagggcattgtagggttattaactggcctcatttcaatattgttgtatctcaggaaataggggaggcccaaggaggaggagagagatgagggaaaggtcagtcagtggagcaacagaatatacacaacatttatcagttaagtttgccatcttatatcagtgcagtttgtagcaccccaaaacaattaaaatggtaacatcaaagatcactgatcacagatcaccatagcagatatataataataatgaaaaagttggaaatattgtgagaattactgaactgtgacacagagacatgaagtgagcacatgatgttagaaaacttgcgccaatagtcttgcttgatgtacgattgccacaaatcttcaatttgttaaaaaatctgcaaataaatgaggcatgtctgtgtttgtttaatgattaacaatccgtcacaaactggataattcatcagcaataactcatccagtttgtgattcatcaatccatcttcgttttgctgcatttcaaaacaagcctcagtcatccatgtatttcatgcctaaacacttcagtaggtgtatcattaacttaagttcagtattgaacgtagttcttcaacttttttggagataaggttatatgcagtgaaatgtgcaaatcctaagtgtgcccttcaaaatgtgtcaagaaccttcctgtcattgctgtgtcagtcattttagaagagtacagtgggctctgtgaccgtgtttgagttgcgcctataacagacaaggttatggcctctcatcctacagcacaacaccccgatcccccaaggaggcagaggagccatccagtttgtcacgcattatcagcactccagcacccagagacgcatccgcgtgaccaccatcgcccgaaagtaagcagccccagtttcctttctgttgaggaactgactgacatttttcccttgaagagatactttaacatttgttagtttgtctttttgattccattgaatggttctcaccagacctcattagcttatttgatcagaggaggaggcatttttggctaacccagttgggcctatgaacacttgcctagaggaatcatctttctgtaggaaatatagttcattaaaagtattaattattattattatcatctggagacagtctcgctctgttgcccaagctggagtacagtggcacaatcacagctcaccacagcctcaacctcccatgctcaagtgatcctcccacttcagcctcccaggtagctgggaccacaggcacctgccaccaaaactagctaatctttttacttttatgcagagagatggtgatctcacattgttgcccaggctggtcttgaacttctaggctcaagcagtcctgccaccttgccctcccaaagtgttgggatttcaggaatgagccactgcacctagcctgtgtttctttttctgaatggatgtctggctttctgatctctcctaaacataagcatggcactaactctggaattgtcagttgggcagatgtacagagtcagctcaggcacatagaagcagcatttgaccaggaggctgcggcagtgttgatggcacggcttggggtgttccgagcggagtcagaggaggggcccgatgtgctccggtggctggaccgacaactcatccgactggtaaattggggacagtggcattaggttcagtcttggtttctgctttactttcgagaagaaaattgtcacttaattattattatatagtgaatcagcaagaatttatcagttgcctaccttatgctgcacgctggacattctgttaaagacgtgttaaatgtgcattttcccctcagagatttacattatagttgggaagaaacaacacgcatggagcatttggagagtgatacaaatctgtgtgggttgagttgacttagatgagtcattttgtgaatgctctggtcttgtatttttcttctaaatctggaaagtggttttggaaatagggatccagcctggtaagtttagggagatgccttttatcagtctggatttaatgagatgagagaagtcacactgtaatttaaatggggaaagtcttttataaagaatacaacaagagagtagaacagtgagggactggctagaaggaagtatagagaagtgggcagccactacttgtggggctgagatagagcaccaaaggaagtgcccttctccccagggctgatccagacctagttgggagggcatggccatggcttggtgagtcttttgcagagaagttaccgtggtgctgtgccaggggaacttactagaaattcactttctagaatttgaagaaaatccaccctccagggtgccagggaaagctgtgtataggaaaatgtctcactggagacatgcagggatgctgcttagctgctggctgccatgttctccaggagctcagcactggggagccacggtgcagcaggacctggcacccgggaagctgctgaatgagcactcgggcgcccaaagctgacgctcacctccagcactctctactgacaacgcttgatatcgtgccagctggcaaaggagaggtagtgaaagggcccatgtccatttcacagcaggcaaagggggtgagtttggagccagcacaaggcaataaatcaataattggcacatgataatcttaccttcctggagagtcacagcatgtgtttgtgatcaaagccaccatggaaaggcccagtagggaaacctgtttcattttgttcagccctctatttgcccttgccatctcatggaaccatttttcaggaagtgtcaacatttcaaacataatttgaaaattgcttctttaggatttcagagggaggatagataagcagagggcccaggtggctaacaaagacttcctgtggaaatgagccttgagtcaggtttttattacagaattaattggagaagggaaggcaaggcttgctgagtggagggctagcaggaatgagcctgcaggagctagctgggtcttttagcttatgctgaggactttggagaaaccagtgtcacaggaggctaggttgtgcagtggggaacagagtcagggaaggtacaccttgattggggagctccttaactttagggagcaagggagacgtggctgtgattgttaagcgggggtttgatgtcagcatgatgcttgtgtttacatttaatatcaccatgtgaggcacattgcagagagaaaaggctattgttgtgaatggaggatttttcaggctcaatggcactgagaccagcatagtggcaggagagatggaggaagcagaaggtttgaaatcaggatgtaaactgaaagaattgataaaacttgatgaaatgattctgtgtaaagtcaaaaaccaaaaagtcagcactgaatgacatttcacacatgggtaactgcatgagtggtgttgaggtagaagatgggaaaggagagcaactttagggtgggagaaagttttttctctttttttaatgtaatagtttatttttgataatttttgataattgaatgtgaacttgcaaaagtgtgtctcacgaaaactcccatatttgggtggatgtcctgactggggctcaggctataggtcagcactggacactggagggtggatttggatgacacccatctggctctagtgttcatttgtacccaaagcagtgaggatgggaggagggggccaagaactaacccccaaggagtccacagttagggggaggaggaagacaaaaccattgaagaaggcagaaaagggttggttggagagattatgagaaataggaaagtgatgtattagcagctgaaggagaaagtttcgagacatttgggcagtcacctggctcatgctgctaggaagttcaagaagacgagaactgcggaaggacaccagattttgtgggaagaaagtaattgttagaaatggggtttctttaaatgatgaacagtccaattctttagtgaccagaaatgtgtgagcagaaataaaggcgggaagagaaaacattgtggttcagaagtctgccattgggagaaataaatttgagttttagtgtgagagaacatcaaagcgtaactataattgttagttttcatggtgttagagggttttcatatggaacaggtgcctggaagagctcacctagcttctctggttagggcagtcctcaggccagcattgcctgagagctgattagagatgcagaatcttcagctcctccctagagtctgcattttaacaagatcccctggtcatttgcctgctcactgatgcttgagaagtgctagtctaggacttatagtaagtggcagagttcagactggatgtagcttagtccaggaatatttccaggtaatgctaacttagatttttctctctctttttgtgtgtgtttgtttgttttttggtattttctttccatagtgtcaaaagtttggacagtataacaaagaagaccccacttcttttaggttatcagattccttttctctatatcctcaggtaagtaatgtatgtttctaaaataactacagagcaataaattttgatagaaattaactttattcttagggtaaagtgaagactttttaatgtgttgagactcagtctgtaggtgacagagattgttcaacccaagtcgaatatgtgtctaggcaagacagcaccctacgccctacagaagatagagatgacatgcagaggggagaaaactcatgcatacattttcatgaacaggcaaaataggatcattgatataaggccgtaaaaaatatctctcatgtgtagaagttctggggaaacagctacctcagcaacaaaccaagaaaatgagcacacatggagatgaagataacaaaacaaaaccacagttagtacaacaaatatttaataatatgtctgtggttattatgtgcatcataaccaggagtgagcaataagcagctcctgaaagtaactgcactctgcatgaaccaagcctttggaagccattggacaagagagaggagcaggagaagtagatgaatttccgtctccattgtaacttaggaaatagagcacaattcatgggtgtctataaggattacaggagctgaggccaactgagtattaaatatttagcacaatgccagtaacctgttcagcactaaatgtgacctagctccatagcaggtgcctgggactctgaggtgtccatgtgccagaggttaaagctgtgtggtgttgtgagaagagccctggaccggccagagtcaggttgaggttccagtgctggctccgcaggggctgaccttagaggaggttccaaagccccgtagagtttggtttcccacctctagcagtggggagttggtctggtgaagtggtttgcagttttttttttttttttttttttttttaaagccatggaatcctttctttgagaggagctgcccttaaaagccagcacataaagcagacagagttggtgcttctctggttgtgcctgtgtaccacccccacactgggtcccaccagagccctcatccctgggcccctgaggacttgatgaagactctaagagcacagcttgaaaaccagatgaaatgctttctcagattccttctgtcaaggcattctaggaaagaggccaacagcccagtctctagagccaggcggccaggtgtagagtccagctgtgacactcagtagtggggtgaccttggacaagttgctcgcccctctgtgcctcagtttcctcacctgtaaactagggatggtaagagaacttacctcatgggcttattggaaggattaaatagttcttgtcaagtgctttgtgacttgcatgtaggatgtattagatgtcagccttgattattatttaggaacctatgattgaatatttggagtctcaggaagctttacacttcacaaggcagctcattttcgtgttctggcaactctttaatgtgagctgaaagtctgcccccaccccttcttctcatcctcgagggcgagaacctatggttgcagtgtcatcccttgtccctttctcccctgcaccaacacttcaccatcccagcttgtgtcctgagctgtcatctgctgttcctgtgcctggaatccccttccccctggccctgtggcctcctcagccacgtctctcagggtgcactgtcagtccccggagctctaggaagtctcctcctggccctccacccccactccccactgctatcctgtactctggctcataactcgtagcccgagtgtgcctttctcactgggcctgacttctgagagcagatattctgtctccactgcctggcacagtgactctggaaataaacatttctttggctttcctcttaactgtggaagctttgacatacccagaggcccttttcttaaaaaaattttgtatttttttaaaaatttttaatttttaatttttttgagacggagttttgctcttgttgcccaggctggagtgcaatggcctgatctcagctcaccgcaacctccccctactgggttcaagtgattttcctgcctcagcctcctgagtagctgggattacaggcgcccaccaccacacccgggtaattttggatttttagtagagacggggtttctccatgttggtcaggctggtcttgaactcccgacctcaggtgatccgcccgcctcggcctcccaaagtgctgggattacaggcgtgagccaccacgcctggccaaaggccctttaaaaaaaaaaattaatttttaatgtggtaaaacacacataacaaaatttaccatcttaaccatttttaagcataccgttgagtagtgttacgtgtattcccattattgagcaactgatgtctagaatttttcactttgcagagctgaaactctgtgctcattaagcaacaactctcagttttcctctttccctagcccctggtgcccccttatgctttctgttctgtgaaaccagagagcccttttctgggttctcctatttcagagccctgaggtagatctactctgtgggtgtctaagaaggttacaattatatgcatttctctttccgttctttgtgaatgcagtttatgttccatctgagaagatctccatttcttcaagtgtttaacaacagtcctgatgagtcgtcatattacagacatcattttgcccggcaggacctgacccagtccctcatcatgatccagcccattctctactcttactcctttcatgggccaccagaggtgaggctctacccaaatgctttcctgaggattggaatcacctaacatatattcttttttaagcaaatttacttagcagaactgtaaaaaagaagtaaaatttggagtttttatagtaatttaacattatttctattaaaaaatacctttaggaaaatgtcaaaggacatataaagctattatttgtgaaaggcaggaataaatgtaaaaaactctaggaaataacttggatgctttctttttccttgtgcttgtatacttacatccaacaattccatgtcttgtatctgaaggaaagactcctagatacagagtagactttgtgccaaaaaaaaaaatagtaaaggaactactataatagaggatcaaataacaatccgaatgtttaatataggaaaataaataagtaacctgagaaatgcagttgaccctcagtattcatggaagattggttccaggacctccctcagataccagaattcttagatactcaagttactaatataaaattacataatatttgcatgtaaccttggcacatcctcctatatactttaaatcatctctagattagttataatacctaatataatgtaagtaccatgtaaataattgtcatactgtatggtttagggaataatgacaagaaaacaagtctgtacatgtacagtacagatgcatatttttttcaaatattttcagtccaagattggttgaatttatagatgtggaacccaccgatacggagggccaacagtattcacaaaaagtatgtaacataataaaatagataagtccttatgtaaaaatgttacatgaaaaaaagtcaaaatagaaacgtttctaaatattccctgcaaaaataaagaactatatggaaaaaaacaaaatatcaatatttgttgtacttgggtacacatttaaaaattttctttatcgagtaccacttacttttattattgaaataattactaaaatagcagggggatcacatgacatcaggagtttgagaccagcctggccaatgtggcgaaaccccatctctactaaacatacaaaaattagcttggaatggcgccaataatcccagctacttgggaggctgaggctggagaatcacttgaaccccggaggcggaggctgcagtgagttgagatcgcgccactgcattccagcctgggcaacagagcaagactccctctcaaaaaataaaaataaaaaagaaataattacatatataaaaattatatgtgtatatgtaaatataataaattatatatgtatatataagaactatgtatataaatatatatgtatatgattatatatgtatatataaatataaattatatacttatataatataaaatattacttacaaataaataataaacgtatttttttttgagatggggtgtctgtcacccaggttggagtacagttgtgcgatcttggctcactgcaacctccgccttccaggttcaggtgatcctcccacttcagcctcctgaatagctgggaccacaggcacgtgccactacagcccggctaattttttgtgtttttggtagagatggggttttgccatgttgcccaggctggctttgaactcctgggttcaagtgatctgcctgccttggcctcccaaagttctaggtttacaggcatgagccactacgcccagccataatttatattttgtagtaaactttaaaaacttgtattaaatgctgcttttcatataggtatccgtattctgtctcatctacagagaatgtctgtagagattgctaaaatacatacaaaactgagaatattcagaattatttttcgttccaagatcaaaagatatcattaagcctggacaacatagtgtgagaccctgtctttacaaaaaataaaaaattagttgggcgtggtggcatgcacctgtagcctcagctactcaggaggctgaggtgggagggtcacttgagcccaggaggtcgaagctgcagtgagccagggtcacatcactttactccaggctgggtaacagagcaacaccctgactcttaaaaaaaaaaaaggtatcattaatctccgttctcaattgatgaggaattatttggagcctatttttcctacaaagttgagaatgagtcagaagcagaaagtggaagtatgtcaggaagaaaaggggtgacttactgtgctgggcaccatttgtaaatagcctttgctgtggataccaggcatgggatcagggtcgggtggaagtggttgctgtgtggggagcagggaagaccaatgccatctttctctctctttttcttcagccagtactcttggatagcagcagcattctagctgacagaattttgctgatggatactttctttcaaattgtcatttatcttggtgaggtaagatgatattattaattaattaatttctttttgtttttaaattggagaaaaggcatacacatttaatgtgcacacaaggagaattattgtccttaactatggtttttgttttcttctcttatttattaagttaggtttttaatgacatttgtaaccacagtttgggcttagaaagcaccatggcttttattctagtaaatccctggagtatttgtatatttattaattttaatcatatttgctgttaagtatgggccaggtgcagtggcttatacctgtaatcccagcactttgggatgctgaggtgggcagatcacctgaggtcaggagttcaaaaccagcctgaccaacatggcaaaaccccatctctactaaaaatacaaaagttagccaggcgtggtggcacacacctgtagtcccatctacttgggaggctgagatgggagaatcacttaaacccgggaggttgaggttgtagtgagctgagatcacaccactgcattccagcctggtcaacagagtgaaactccatctcaaaaaataaataataataataataatatatgctgtaaaaaaatctcaggtggttattttaaatcactgtaaattattaccttcgaagttaggcaaaactagttttttctcctcagtaaatattttatacatactgctgttctttcagagttatatacatactgctgttctttcagagttagtgtttagagctaaggttgtactttgatgaaataacatggcccagggaactttacgctgtgtctgtggatccctaggatggctgtggatagctttcagtccatttctttctcagtggggttcatgccctgagaaagggaatggctcctctgaattatttgcatctttatggcaaaaaatcctttaatgaagatgatggtgatatttatattcagtgatgctttttcttctattgtatgatctctaccttcttaaattggttattgatttggtttcctaatggccaaccattagaaatgatttctgatgtcgtgaaaagatataaattgtgtttcaggattccttcagtaacttaggaagtgttagttttctaatactcctaagtattttataactttaaacttttttcagcatgttaacacccagtctgctagccacttgcacgcaagtgctaggctgtcagtaatagtcctagactgagagccggatgaccagctgctcttcccactggaacctttggtatcagtacagttggccctctgtatccacgggttccacctctgcagattcaatcaactgcaggttaaaaataattttgaaataataataaaaaataatacaaataaaatatacagcacaggccgggtgtggtagttcatgcctgtaatcccagcacgttgggaggccgaggtgggcggatcatctgaggtcaggagttcaagaccagtctggccaacatagcgaaaccctgtctctactaaaaatacaaaaattagctgggcatggtggcagacacctgtaatcccagctgctcgggaggctgaggcaggagaatcgcttgaactcaggaagtggaggtttcagtgagctaagatcgagccagtgcactccagcctggacgacagagtgagactctgtctcaaaaaacaaaaccaaaaaaacagcacaagaacgatttatatagtttctacattgtattagatattataagtaatctaaagatgatttaaagtgtatgggaagatgtacatcggttatatgaaatactatgccattttgtatgagggacttgagtatctatggaatttggtattgggaggagtggtcttggaaccaatctcacagataccgagggccgactgtactaaggatgaagctttctttgccttaagctcatctccttatcgacatttcttttgcaacccctgatcctgttcattcacttgtttattgagcaccttcttgtgcaagtgaggggttctaaggataaagacagtgacattgctctcaccttcccaaagtcctgagcgtgctgaacgcgagtgttcttatgaacttctggaccctggtgagctcgtgggcatttcccataggccaacagtcaatcacagcatttagacctggaaaacggtaactgctactttgagaaggagtgagcaggctacagaaggaggcatctgatgagaatcctctgcctggagccatattaatggctctgttaagacacattgcacacttgctgtagcctctttctccatttttcctctccattgtcttcttgttctcctaaataacatgcgaaagcacttcactttatttataaaggtatatgaatcagttaatgaatgtttcttgatttcctgtgtatacaagatattttctagaccagttgtggatgagtataaaagaaggaagggtgataaaatgtgtagcgtagtcagggagacagatcgtctgctttccacagtttagcatatggcttctcctcactgcctcatcaacactcatactttgattcttacagcttttgtctcctttgccaagggtaccccaattcagggcccagggggagcaggggatgggggtgagacaattgcacgcaagtctgtatgactactgctcaccagaggagtgtaatatgtgtgccgttaggaaaggagatgggggagtggagtctgtgtgggcagccaacaaatccctttccttaccagatgtgcggagatgagaggctagactgagtgataacagtggaagtggaaaaggagggagtccaccgctccttgggatgagtaatccatgggctttgttaactagttgatatagaagagaggaggcatgagtgacgcctgacattcctgggggaatgcgcaggcgggggcattttcctcctgcttctcctcctgccggtagctctgctttgctctccctctgaagcttgtcatttttgatattagacttcttcactagaaacaagctctgggtggcgatggtagaatgtcagtgtcagtgaaggctgttattacagtttccacaatagttttggttggtttgtttctgtgtagaccatagcccagtggcgtaaagctggctaccaggacatgcccgagtatgaaaacttcaagcaccttctgcaggcaccactggatgatgctcaagaaattctgcaagcacgcttcccgatgccacgttacatcaacacggagcatggaggcagtcaggtgagtgagctgagttctaactccagtggtttgttcgttttatgatagattgttattgctatacatctaaacaggatggttaatattttatgtgatgacataaattgacacacaggtaatcttccaaatatgacttctttttaaatgagtggtcaggccaagcgcggtggctcacacctgtaatcccagcactttgggaggccgaggcgggcggatcatgaggtcaggagatcgagaccatcctggctaacatggtgaaaccccgtctctactaaaaatacaaaaaattagctgggcgtggtggcgggcacctgtagtcccagctattcgggaggctgaggcagaagaatggcgtgaacccgggaggcagagcttgcagtgagctgagatcgtgccactgcactccagctggggctacagagtgagactccgtctcaaaaaaaaaaaaaaaatgagtggtcaaaatgtgcttatgtaaagggattgccaagataaaatacatattttatgttttaggatccttaaatggagagccagtgggcttaagctaaagaaatagattactgtgcagtaaaacaattctaattagattactgtgcagtaaaacaattctaatttaaccaaacaaatgttgtaaaaacttatcttttttctgttacattaatattaatgtcactttttaatctttaaatctttttgttgttgttgttgttaaaggctcgattccttttgtccaaagtgaacccatctcagacacacaataacctgtatgcttggggacaggtaagaaatcttcaggtatttggggaggatgctaagctagtttttttttaaacttgttttaaaattctacaaattggatctcttttggcctggagacagaataactgcgtaagttgggtattttgctggggagtggcggggagggaaacaagttgaataacattactgggccggaggttgagggggctccctgggtgtgtccccttccacaatatacagcagaacataccaggttcaggccaggggacagagcactgtactgtggcctccatggtggtgtcctccgtcacacagcctcatggcccctagtcctctccccaccaagaatacagggcaacttgtcaccatcggttttgccgcctcctcactttccagcctaattccttcccttttcttcccccaaccccgcctgattactactttatctaactgctcccagcatttatgtctctctcagatgagtctttcctttcattctgttttcttaaaacatttttaaattaaatttttttgagatattgtaaatttacatatagttgtaagaaataatacagagagatcacctgtatcttttacccattttcccttagtgttaacatcttgcaaaaactataatacagtatcacaaccgggatattgagatttttaaggtcaagatgtgcagcatttccatcaccacacttatgcactttatttctattattgttacattgtaatatataatgaaataattgtacaactcaccataatgtagaatcagtgggagccctgagcttgttttcctgcaactagatggtcccagctgggggtgacgggagacggtgacagatcatcaggcattagattctcatgaggagcatgcaacctagatccctcacatgcgttgttcacaatagggtttgcactcctattagaatctaatactgctactgatctgatgggaggtggagctcaggtggtaatgcacgtgatgggggagcagctgtaaatacaaatgaagcttcacttacttacctgccactcacctggtgtgtggcctggttcctaacaggccaaggactggtactatccgtggcctgcagttggggacccctgatttaaagtgtatgggagggtatgcataggttatatgcaaatgctacaccattttgtattagggacttgagcatttgtggatttggggatccacaggaggtcctaaaaccattcccccacagatactgagggatgactgtatatagaaatacaattgactttggtatgtttatcttgtattctgtgaccttcctgagtcgcttactactcttaggagtttttttgtaaacttctcagaaatttctacttagacaatcatgtcatctgcaagccggggacagttttatttcttccttttcaatctgaataacttttactttattttctcaaagaatcagctcttcatttcattgactttattatctttttattttcaatttcattgattgctgctctagtcattgttatttcctctctcctgtttgcagtaggtttttaaaaactcttggctgggtgcggtggctcacgcctgtaatcccagcactttgggaggccaaggtaggcagaacacgaggtcaggagttcgagaccagcctagccaacacggtgaaacccccgtctctaccaaaaatacaaaaattagctggtgtggtggcatgcgcctgtagtcccagctacttgggtggctgaggcaggagaattgcctgaacccaggaggcggaggttgcagtaagctgagatcacgccactgcactccagcctgggcaacagagcaagacgctatcttgaaaaacaaaaagaagtgaatttattatagacagcttatagttgggtcatggtttttaatgcactctgctgagctctcttacttggtatatttagaccatttatatataatgtaattaatgatatgttagggcttaagtgtgccattttattttttgttttctgcttttcttttttcatcttacgtacttttttcctgccttcccatgagttatttgaacatgttttaggattcccttctgacttgtttgtaatgtttttgagtgtatctccttatttagctttttaagtggttgctcctaagtgccctaggtttttttattttaattgagatgaggtcttgctatgttgcctaggctggtcctaaactcctgaggtcaagcgatcctcccacctcagcctcccaaagtgctgggattataggcatgagccaccacacctggccaggccctaggtattacatcatatatgcataacttatcacagtctactggtgttcaagcgaagtctagagaccttacctcccttttcaacactttactctcctccatcggtaatataattatgttaaatatttcctctgcatacatttagtatcacatcagacagtgttataatttttgtttcaagcatcaaacataattgataagtcttaaaagaaaaacctattatatttctctacatggttgcttttattgttttctttctttttagagatcttttagccattctttttttcttttttcttttcttttttttttttttttgtttttttgagatggagttttgcacttgttgcccaggctggagtgcaatggtgtgatctcagctcaccgcaacctccgcctccaggttcaagcaattctcctgcctcagcctcccgagtagctgggattacaggcatgcaccaccacgcctgactaattttgtatttttagtagagacagggtttctccatgttggtcaggctggtctcgaactcctgacctcaggtgatccgcccgcctcagcctctgaaagtgctgggattacaggcatgagccaccgcgcctggcctacttttaaccattcttttagcataggtcttctggtgatagatttttagttttcttttatttgagaatgtcttgacgtccctttcatttctgaagaatattttctctgcatataggattctgactaacagcccttttctttaagcagttgaaaaatattgtgctgcttcctctggcctttatggtttcttatgaaaagttcactgtcagtctcattgttttcccctgtagagaaggtgtcattttcctctggctgcttccagtagtctttttctgttgttagttttcagggtggatgggcaggggcagagaagaaagtgtaattatgacatgtcttggcatggatttctgtgggtttatcctgttttgatttactcagctttttgcttctgtaggtttctatctcttgccaaataggaaagttttcagtccttatttctttgaatgccttttcacctgctctcttttctttctttcttgacatccagtgacatgaatgttagatcttttgcagtaccccaggtactacatttccatgtattttctttcttttgttcatttgggtaacttctattgttttgtcttccaatgtattgattcttttttctgttctctttctgcattgaacctatgcactgcgctttttgtttgtcactgtatttttcagttacaaaatttccttttggttctccgtgacttccacttctttcctgggaccttgttgtttctttgctgaggcttcctattttttcatttgtttcaagtgtgtttgtaattgctcatgaagcatttttatcatggctgttttaaaatctttgtcaggtgattctaacattgttgtcaacttagtgttaacacctgtcacttgtcttttttaattcaggtggaggtcttggtaatcactttgtgtaagtgatttttttattgaaacttggacacttgagtgtttgtatgagaccctggatcttatttaaacctgctacttttcgctgattttttcttacactactctgacagggaaggtggttggtggggggggtgtcgggggcactggtgggctccattactgccaggtggagaagtccaggttttccactggcctctgttgacacctcggggtgtctagtgatttcttgttactgcttagtgggaatgagagttccagctcccccatagcctccagtgagaccgctgtggagatggccttgttacacttgggtgatggtgaaagtcctgaccctcctccaggcctctgaggccaccccagtaggcaggcggagggacatatattttgccaggttgcggtggaagtccaggctccccaaatggcctctactgacaccacaggggtaggaaaatttttttacttggccattggggatgaacttcctggttccatacttagccttctctggcaccatcttggtgggagtattagggtgccttgttactgccttgtgagggtagaaattgtagctgcccacccagcctttgctggttcaggtgggtcagggccacagtttttcctctcatttttgcccggagtacagtggttattatctaagattgttctgtcttgctaggctgctttagtcctttggctagagaaagtgggtgttttttgttgttttgttttgtttgagtctgtgctcaatgacaatttgccagcttcctcagctccaaattcagagtatatgaggcataagaaagcccaaggaactcactgctgtgcatccttgggtcccaaggtctttagtttttctgtcttctctccacctttaaaagtcttcttatgtttggtttacataagatgcccgaagttttcagttgtacttagtgggaggaatagagaaaagtatatattctattccttcctcgaaatcctctgaaaacattttgatcatgcttacacttttctaattataacagtatggtttcattttagaaaatttgaatatgttttaaaaaataagaaaatttaaattacctagaatcattatttaaagagttaactatttccagcttttttctacgtaaagtgtattattgtgtgtgtgtgtatatatatatatatttttaatttctttacaaaattggaatcttactacaaattgaggtttctattcaatttttcccataacattaataaaattataagctttttctgatatttgaaatatccatctgttcagtggagataccagttcactcgtttgtgggtacaccattatccagcttctgtggtaagcagagcacttaagaggaaaggcaggcatatgggcctccgtgagctcacagtggtggggagctagaccctgggtacttcatcaggactatggagaagagggtaaagtaaaacgcctgatgctcaaaactagcaggcggtggtggcctgatctcggcataccaggaaaggattttgtgaggaaattgtgctttagtcaaaagaagttgttcgtgaggcagaggatggggtgatgggagtactcgtagcagaggggacaacacctgtgaatgttctgagggaaggtgcttgacagctcatgaattctaatcagcttctaagatatctgccaactaatctttatcattacatttcaggaaactggagcacccatcctaactgatgatgttagcctgcaggtgttcatggaccatttgaagaagctggctgtctccagtgcctgttaagctgaggatacaaccaggaaatgcaacggtgtcagattgtgttcaaaatgtctagaaaggcttgataacattcctgttacttttctagcagattttaacaaataatcaaggacattttatatgtaactctttagattataatttatttgtattcctgtctttgtcctttttcttgcactataaaattataaggtcataaatgttttggtacttgtagatgtttatgtgctttttgtatcctaacttttagaatctaaataaaatcagaggtaatgtattttggcagcttgtttaggtgagaatcttaatgatcataaaggaaataaatctagatgcagaaagtactggctaaaatattgctaatacaaatgtgatttcctgaggtctctgtgtgagtgtgtatgtgttttaagtgacttccttaagaggtgtttcctgaacctaattctcataattaaagtaatgtatatgcaggatcaaaatgaaacaaatataccttatcctaaagagctcataacaaataagttacctccactctataaactcagacctactttttgaagataactgcttttaacctctccttacaagatttttgttgttgatgtatttaattttagcccatgtctcaattctcattttcaaagaatcaatatattaatatacctttggtcatttttgtatttttatttttatattatcaagattggtaaaatgtatattctgggtcagatacagtggctcacacctgtaatcccagtgctaaatttaggaggccaatgcaggagactcacttgaggccaggagtttaagaccagcctgggcaacatagcgagactgtctctacaaaaaattttaaaagttactgggccatggtggtgtgtgactgtagtcctagctacttgggaggctaaggcaggaggatcacttgagcccaggagttcaaggttgcagtgggctctcatcatgccactgcactccagcctgggtgggagagcaagaccctgtttcaggaaaaaaaagagattatattctggcctattatcatattttttgtcactaagttgattgtcaaagctgaaagctcctaagaagcatttacacagccgtgatgatgtaaatattgttccagtccaagccaggtaggatgacatttttctctagggtgctagtgtcccagtcagtccctatgtcacttgtaggaaaacattccaaaggacagaatcagagttactttcttacattccatcatgccgcatgttggtttgatccctatttggattatgatttcttagatttgctgtggttttccccagaatttctaaattttgtttgctttctgagagaagaaatattttgctttctatttactaagaaattctagcctattctactgaatgaagtccatttttttcttctttggaggccactgatgtccccttttaaggggggccaataactttgacctactgcacaactgtcatccaggaatttcttctgtttggaatctcgggttagttccactcttccctttattccataaggcattttgcaatctcaaatgacttttactaaaaggagtacttggggagaactcactgcatcttagcatatctgcaaatctattctgtcttcacactttatagctttgccaggtaatatagtttggatatttgtcccctccaagtccgtcattgaaatgtaatccccaggattggaggtggggcctggtaggaggagtttgggtcataccgctggatccttcatgaatggcttggtgccatcctcacagaaatgagtgagttcttgtcctgggttcaaatgaggtatgattgtttaaaagtgtgttggctgggcacagtggctcatgcctataatcccagcacttagggaggctgaggcgggcagatcacctgaggtcaggagtttgagaccagcctggccaacatggtgaaaccccatctctactaaaaatacaaaaattagccgggtgtggtggcttgcgcctgtaatcccagctactcaggaggccgaggcatgagaatggcttgaacccaggaggcagaggttgcagtgagccgagatcgcaccactgcactccctgggggacagagcgagactgtctcaaaaaaaatttttttaaagtgttacctcccccacctcttcctctcgttcttgccatgtggtacatcgggctacctcttcaccttctgccctgattgtaagcttcctgaggccttcaccagaagcagatgctggcaccatgcgtcctgtacagcctacagaaccgtaagccataagcataaaccgtaaacctctttttaaaataaattacccagtctcgggtgttccattacagagatccaaagacagactaacccactgggtctaaaaagtataggcccaagataatctcagaactttggagtcattctttcattcgttcaacaaataactatccggtacttgttgtctatggagtagtcttctaggcattgggaatactgccaataaaacaaaaattcctgttttcatagagcttatgtgttagttagggaagaccaacaataacaatgttagaagtaaatgatatggccgggcgtggtggctcatgcctgtaatcccagcactttgggaggccgaagtgggcggatcacctgaggtcaggagtttgagaccagcctggccaacatggcgaaaccctttctctattaaaaatacaaaaattagccaggcatggtggtgcacacctgtaatcccagctacttgggaggctgaggcagggacaaattgtttgaacccaggagatggaggttgcagtgagattgtgccactgcactccagcctgggcaacagaacgagactccgtctcaaaaaaataaaaaacaaaaaagaaatgaagtaaatgatacattagaaggtaatgagtgctatgtaggaaaatgaagctggaagctcctattaattggatgttggaacagctggattgattgcaatactctgttttgaatttgtattcgaatacaagttattgtatttctttttgtctctgccctacattctagcagaattctagcagagtttcctatcttaaaatgttgaacattggccaggtgcggtggctcacacctgtaatcctagcactttgggaggctgaggtgggcagatcacttgaggtcaggagttcaaaaccagcctggccaacatggtgaaaccccatctctactaaaaatattaaaaaattagccaggagtggtggtgggcacctgtaatcccagctacttgggaagctgaggcaggagaatcacttgaacctcggaggtggaggttgcagtgagctgaggtcacgccactatactccagcctgggtgacagagggagacttcatctcaaaaaaaaaaaaaaaaaaaaaagttgaacatttacatttttctgtgcgttttccaagaatatttttagttttggatataatttttaacacatcatatagaagaatacataaagttgtctgtacagattaaggccaaaacatcctctttggcttttctgtttcaaattaacagaaaaaagactgtgtgatagacccagctaactctgcggttctctctagtgtcagtgagttaaggagctgagggaactgcatggtatgacatggccatgcaggtcccaccttagggtaccagtgacgtttttccacagaatgtagggggtggcagggtgatagtgctgtgtggaaaacagctatcatgagaaggggccactgagcccagtatgcccagtgaggactctgaactccatctttttattaattgttaatttttgtgggtattgaactccatcttgaaggtagggcaagcctctgacttatcttaggcagagggtgaaatgataatttaaggtttgaaagacactccagagggggaaggatgagaggagactgtaatccaagtgagaaatgaggcctaaacagagacagggtatttagacagaggtgacagaggatgtcaggtgagatgattccaagttcctggcttgggcaatttctcaatcactctctgaatcagggaagagaaagggaaggtttgtttcctgttgggagtggcattgataaattcaattcggaacatttttttagtttcaggagcttgtggaatatgcagccgaggatgcatagcaggttggcagtaacatgaatttgctttcagagaatctggagtagatttgagagttattaacatataacataggtatcatgagtaaggctgatgagaaggatgagaagagacgcaagcttgaaacaataccaatttttctgttttgtctataactattgagctatagttcacatataataaactgcacccatttaaagcatacaattggataaatcttgacagaaaccaccacaataatcaacatacagaacattaccatcacctctcaaagtctcctcagacccttttagcccttccctctctccatgcccttactgcagacaactactcatcagctttctcccactggagtttgcttctagaatttcgtgactggtttctttggtgtctagcttgctttttcacttagcataatccattttgagattcatcgtatggttgtatttatcagtagttctttttttttttttttttttttttttttgagaaggagtctcactctgtcacccaggctggagtgcagtggtgtaatctcggctcaccacaacctccgcctcctggattcaagtaattctcctgtctcagcctctggaatagctgggattacaggcgcccgccaccatgcccggctaatttttgtatttttagtggagacgaggtttcaccatgttggccaggctggtctcgatctcctgacttgaggtgacccacccatcttggcctcccaaagtgctgggattacaggtgtgagccacccgtacccagccagtagttcctttttatttgtaagtggtatcccacgttttgtttagccatttactcgatgggtattgggggtggtttctattttttcctattaagaataaaactatgaacattcatgtacatggctgtgtgcagacacaggttttcatttctcatggataactagaaacggaatgcctgggttatatggtaggcatatgttcaactttttaaaaactaagttttgcaaagagattgtaacattttatgttcccatcaataacagttccaattattccaaatccttacagctcttggcattctcaatctgattttagccattctagtaggtgtgtaatggtctcttattgtattcttttaatgtccatttctgtgatgactaatgatgctactgtgcttattggtcatttgtatatcttctttcgttctattcaaatttattgcctggtttttagttgggctgtatttttataactgagttgtaaagcgtcctcatatattctggatccaagtccttttgttagatatatgttattatgaatattttattctgtggcttggcttttcattttctcaactgtgaccttcaaagagcaaaaattttaatttttttttaaaagccctatttatccattttcgctttatgcatatatatataaaatgagatggggtctcactatgttggccttgctggtctggaactcttgggttcaagcaatcctccctgctctacctcccaaagtgctggggttacaggcatgagccaccccgcttgggatgccttttttattctaagaattctgtgcttattccaagatggcaaacatattctcctggtttttttctaggcttatattaaatagttttagcttttacatttaagtcagcgatccattcagagttaagttttttatctatttctgtagggcagaacatcagtttttaaagggtgggcaaggtgaaaagaaccctgaaggataccagggaaaatgatgtttctgaagccatgaaaggtgcaggtggggtcagtggtggcaaatgctttcgaaaccaagtttgagtgtggctgaaaagtacttaacgttaatttaccgggcctaccttgtgccaagcacatcacacttgctcttaagttgttcagtctattgagggcatcttgctttaaaaaatgtatgcataagacaaaagctggaggtggtcggagtcgaaggagattttttgtttttgagacatgggcacgtttgtatgaaggataaacgtcaataatgaagatgggggaggacttagggtgtcaatgaggggaaaggccactgaggctggaaaaaatagtacccagagcctagtggagggattagctttggcctggaagtatttaaagttcacccagagttccggaaagaaaaatggaggaaaagaagagttgcggggagagacaagcggtatccctgcaaatctgaaaactggaagaggaattggaagtaaccttttcggataccgtctggagcccacgaaggcattacaattttgcaagtgagaagcttctcctctaagttgtcatttagtcctcgtcacgtggtaaaaagtatcgcacgcccacagttctacacccgaaagtccggacacctgagcgactttccgggccagaggccccaaggtgcatcggggcagagccggaagcggacgctgaaaactggcggctccttaatggttccggcggcagggaccgcagcgacgccctcaccggaagtcccgcctctgccgtgggcctgcgagaatcgaggcactcgctggcgtacccatgtatcgaaatgagttcacggcctggtaccggcggatgtcggtggtctacgggatcggcacctggtctgtgttgggctcactgctttactatagccggacaatggcgaagtcgtcaggtagggctcttcggcggggcctgccccggaacacacggccttcgatgagagttccccgggggtcatggaaacaacttccctgtcctttaaatcccaggtttattctgcaaaactaattgaaacgggtgctaacagccgtttgttataatggaatctgcaaagaactagactccaggaattattaataccttgtaaatattgtttcctaaatctgaatcatttactggatagggccgtccccatattcagaattggaggaatctgtgtaaagtgcaaggtggactttcagagactctggccggtgatttttaaagagtgatgcttcagtactactgtccctcatcgtatatggcgagcaatttcagtacttttagcagccaaggcgtattaaaatcttccagttactaagcgcaaagggagaaaagtctctcagctttgaaaaatatgctggaaatctgtagagacattaagttgattagtgtggttgctaggggctgaggggttggggagttggggaatgactgccaaaggtatggattccttttgtggatgaaagtatttttaaattgattgtggtgctggttgcacaaatctgaatatactaaaaacattaaattgtatattttaagtgggttaatcgtatatgttaattatatctcagtaaagttgttgtgtaaaaactatgctgaagattacatttggtgatgaagctgtcagtggcctgaaagtacatgtgtccagcattaagcatttaaaaacattttggccgggtgcagtggctcacgcctgtaatcccataactttgggaggccgaggtgggagattgcttgagcccaggggttcgggaccagcctgggcaacatggggagacccccatctctaccaaaagaaaaagaaatttttatatataatattttatatttactttatatgtaatatatggtaaaaatactttacatttatatataaagtaaaaatattttaatgtccatatttatgttttctttctttcgttctttttttttttctttttgacaaggtctcaccctgtcgcccaggcttgagtgcagtggcatgatctcggctcaccacaacctgcgtctccgggctcaagtgattctcctgcctcagcctcccgagtagctgggattgcaggcgcaggccactgctgcccggcgaattgttttattttttttttgagacagagtctagctctgtcgcccaggctggagtgcactggcgctatcttggctcactgtaacctccatctcccaactcaagcagtcctcctgcctcatcctccccagtagctggggttataggcccatgccaccacgcccagctaatttttgtatttttagtagagatggggtttcactacgttggcgaggctggtctcaaacacctgacctcaggtggtccacctgcctcggcccccacaaagtgagattgggattacaggcgtgagccaccgcacccagcttttcttttcccttccttttcattccttccttcattattggggttggagagagtggatgtaattcttaccttagttaatttctaagactttaatgactgctttctaagttaataattcaggtgttctttttttttttttctcttaatggtgataaagtagaccaaaaggatggctcagcaagtgaagtacccagtgaactctctgaacgcccaaaaggattttatgtggaaacagttgtcacatataaagaagattttgttccaaatacagaaaagatcctcaactattggaaatcatggactggtggccctggtacagaaccatgactggctgctgaattctgaaaaccaggacttggttcaacatttaaatttgatagttgccctgattcccattttgggtttgtgaaaagtgtatgtatttaaatttgctgtaaaacataatcactaataatatgcaataaatattttcttgaaggaaactatctgcgttttcttttttttttttttttttgagacggagtcttgctgtgtcacccaggctggagtgcagtggctcgatctcggctcactgcaagctccgcctcccaggttcatgccattctcctgcctcagcctcccgagtagctgggactaaaggcgcctgccaccatgtctggctaattttttgtgttttcagtggagacagggtttcaccgtgttagccaggatggtctccatctcctgaccttgtgatccgcctgcctcagcctcccaaagtgctgggattacaggtgtgagccacggtccccggcctactatctgcattttcaagaggtgttcctctgtatttgcatgagtgaaagattgctgtgaaatttcacatagagcttccataagcttgatttcctgaaactagttaatgtagatttatatttctttcatgttgctattaggcacagctttagtggtcgctttaaggttagtttcagcaaatctccatattcactttgggattcacagtagccctttgggtactactgcgtactgggtaagtatgatataaatttgattgtaacttctgaattaaacagactggacctattctttaggaccagtgcacatacccctcattccttcagcaagtgtggattacccaccaactgtggccagtgctattctaatgctgggaatgcagtcaggacgacatgattgatgctgaaccagtttcctcagtggtctcttggttgcaggcaacaaacacaagtgagcttaaatcaaaagtgggtgtttataaaaaacgtgtattggtagctcagaattaaagcagagagtatgggccaggagcggtggctcacgcctgtactccctgcactttgggaggccgaggggcggatcacaaggtcaagagatcgagaccgtcttggccagcatggtgaaaccctgtctctattaaaaatacaaaaattagctgggcatggcaccgcgcacctgtagtcccagctacttgggaggctgaggcaggagaatcgcttgaatctgggaggcggaggttgcagtgagctgagatcgcaccactgcactccagcctgttgacagcgagattccatctcaaaaaaaaaaaaaaaaagcagtatgttgtcttcagaaggcctgacactgggaccagaatgcaggcagccacttgttgagcctgcctgggctcttggccttgcttttcttattgcacaccagctgcttttctcacctttctggagtaatacaaatatcccaagaagatactacctcccatgtgcagtgccaaagtctgaccagcctctcctcaacctggtctttggcttccacccttgcgagagactcagttcagtttttatcagatccctgcctatggattatagagtactgcctcagttatgaataaagtggcatttgtttctcatttaggtagtgttttcctgttcatagctgttgggaccctgtgagtagagatgtgatgtgtggtaggacaggaattgggcatttcagggttcctctacagtactatgaccttcagaccctcatcttgatttctcattggtgtcagttccaccattatgggtggcctgagcagtgctgtggtgcagtcagccttagtgacaaggattccaaaatcacaagtaacagctccagatgctggtagcagagactcagcttcccaagggatatcaggtcaagcatggattcgtgccaattggctgtgtattccagtggaccatcttggttggcatcaaactgatgaatgagaagcagtgtacgacagtagatggggaaggtgagaagcaagtgaatcagaagtatgggagaaatgggaacagtagcatgaacgttttggaagacatttcctaacatgagggcttccagagaaacaaagggcaagggctgaggggctgtggcacttggcaggtgagagttgttaatagagcacaccgaggataaacagctgaacttctactctcacctggcagtctacccaggattcatacacttgtggggcttaaggggacatttgggttagctttccttgggacttggctgggtttctttgctagatctaatttattctcttatttcagcccagcgttctcctgaactcaagatccatgtccatctagcattgccacttggatatctagccacctcagctttgtccataacttaaattgctgtcatcacccacaaggctgctcttccttccgttctctttctcagagagtactcagttcctcaaattaggaacctatcattctagacttctccctcttcttgttccttctccttcctccagccaccaggtcccatcatttctactgcaaatattccactccattcccaccttcccattccctttaccactaccttacttaaatcctccatcctctttgcttatgtagcctcaacttcctactctctttgtctctacttggagtcccctccaattggtttctacagtattagccagcatgacttttttgaaattaatttttatatttttaacaaagcaacaaatgcattaaaaaattaaataatgatcaaaagtttgtaaccaaaaaaacagttcctgctttatccctccttgctttcaactattaggtttttttttttttttttttggtatttacgtccacatttctaaataataagcttttactaatatctttaatttatcaatcatgtatgggatttattaatgaggatttgatcctcctttccaactgactaaccaataaaactattgcatatttttgatgaatcaataattaatatttaccctgttttaactatgcaaacatagtttgttgataagccaagtaagtgagctataattgtttctcatataacttttctttctggagttaactgcactctttttttcatttgctttgttttcttgatgtttctctctcattctttccacatcctctaacctcacaatataattttccacacaaacctttccagtttctcttttctgtttttaaatcttggagctctttgtcttcttggtacaatctggactgatcactctagttctgctttgcatccatttttctttgctatttgctttgccatcctataatggatctctgttttctcgatactgtgtccccataattctgaaaaagggtatataattttttggtgatttttcatgtctgaacatgtctttttttttttgagacagtttcgctctgtcaccgaggctggagtgcagtggtgcgatctcggctcactgcaacctccgcttcccaagttcaagcaattctcatgcctgagcctcccgagtagctgggactacaggcctgcgccatcacacccagctaattttgcatttttagtagagatggggtttcgccatattggccaggctggtctcaaactcctggcctcaagtgatccgcctgcctccacctcccaaagtgctgggattatgggcatgagccagtgtacccgaccagaacatgtctttttcgtattctcatactcaattactagttggcctgggtacagaaccccaggtttgatcattactttccctcagaattttgaaagcatcagtcccctgtattctagcaattccaatatttcagctgagaagtcctaatctttgattattacctgttttcttctctccagaaggtcttaggacctccttcatctctagtgttctgaaatttttacaatgatgcacctagtgtggcttaaaaaaattgactaggctgatcactcagtgggttcttagttcatggaaactcttgttttgttctggggaattttcttattttttaggaattccgtttgccttttaattttttttctctgtgtctggaattcctaatagacattccagactactttttattattttatactttttcttaactactgttgatctctttgtttattttctacttttcagggagagggtcattcatttacttatacacttgtgaaggcggcaaaattttacctatactttttagggtttgtggctgggcctgagaattaaattgacataaaacagattagccaaagtaaagtgtacagattcttacatgcacttgggagcccccatagaaaaatggagacccaaagtggcaaaacctaactggttatatactgagttaaacaaaaagaggcaattatggaaaaggaactaaaatgtacaggaaaccagaggaggataagagttatttaaacaaggcctgtttgtatagaattatctcgaccttgactctccatctctggtgataagaatggttctttcctcctggtatagggagggcatcttccacatggcagttttatctcttgcttgctttttttttttttttttttttttttggagacagagtcttgctctgtcgcgcaggctggagtgcagtggcatgatctcagttccctgcaacccccgcatcctgagtttaagcaattctcctgtctcagccttctgagtagctgggattataggcacacaccaccacacccagctaaattttgtatttttagtagagacggggtttcactatgttggccaggctggtctcaaactcctgacctcaggtgatccacccgcctctgcctcccaaagtgctgggattacaggcgtgagccaccgcgtccggcctatctcctcttcaaaaagaaaagaggaggtcagatcacccttcctgcacctgctatttttcaagtgtctttagctcgaaataaattttatgccaaagtggcatattttttggtggtgtatcccaccatccttcacattcaacagatagctactgagcccctaccttgggtgtggaggacaaagcaaatccatcttggacgctgatctgccatgttggattctgattaacccttgttccatgaaggcctctaagatttgcagcttatctattgttccttgtgtaagagcatgtccttacagtcaatcctgcccttagatccaacaaccttgatgttattgtacttcagttgtcccacatatccctgctgaaccacccttccctagagtataaaagccctgggtctgcggggtgatggctcagggatccgccatcttgcctggcagccacccaagacacagacacggcttctgttcctacgtccctattaagtgtttctttctaagaaaccagatttgtcagcctcctttttggcctctcggcttccttagactttggggccagtttgtatagccctgcctaccatgggatgctgggccagcattgctctgtgtgctgagtactatataaacaaggccctcaagcagttctatcttccagcggagaaacagacaacaaaaactaagcaaatacattatgtcttatataatacaacttttttttttttttttttttttgagatggggttttgctatattgcccaggctggtctcgaacttctaggctcaagtgaacctcccacttcagcctcctgagtagctggagctactggtgtgcaccactgtgcctggctgtaatccaactttttaattgcattttaatattggctattatagaaagctcttgtaaattagttcctttttatggtatcctattcattgatgaatacaacattttctgatggctggaggtattctaagttgttttactatttattcttgcactgctataagttcctttacatgacttgtttttgtctctctcaagttggaggcatttgtctcatgtcccttcttattgtacaggcattgatttaagaacctttcacgaaccttctgcagcttgaggatgggggtaggtgtttgttaagttatgactggctttttactggtggttggtgttgaagttaggattcttagctacacaccacagaactggagccagttcatgctgaaaaggaaccttgcaaaggatattgggaaactcccagaattagggggatcattggggaaacatagttacagacagcgcagccaggaatggcaccccaagtatcctgccagaccaccaccaggtacaggcactgtggggtcatgctgacaaaataggctgttcctgccgggcccctgcctccagtacctctgagagcagggagtttctgaagaccccacatcagaatggcttcccggagcagcctgcttatcgtcactcgtctccgaatctagtttcacatggggatgcctaactcagggtgtgttggtcacactcctgggccttagctgcaattaagtctgggaaagaatttctggcttctactgtggggatatatggagttttaaggtaagaagttccccaaatataggatgttcacaaaatgctggaaagacaaataccatgacaaatgtccactagagacagcaaggcagatatttttagtgggaggtactgacatgccagcatctgtcaatcagttcccaggagaagggtcctctctccagtctcccacagggatcgagggtagatgcctggctgtaggaatcctgggaactagactggggaggggtttggagatggttgtttagaataagggtttccattgaatccggggccacatccccctcctctgctctggccagagcagaaacttcaggtttcctgagtgaagtgcaggaagttggggtgggtacctgggggtccaagtgttgcttctgcagactcaaacatctctctgcgtccagcccacccttcaccctgcctccacccacctggaattttggtatgtgttatgtagagtgtgtctatattttaaaatccccaataaaaaaacttaaattttgagtctctgttgagctaccctggtaggccacacttgaaaagtgttgtcaggctgggtgtggtggctcacgcttgtaatcccagcactttgggaggccaaggcaggtggatcacttgaggtcaggagttcgagaccagcctgccaacatggtgaaaccccttctctactaaaaatacaaaaattagctgggcatggtggtgcatgcctgtaatctcagctacttgggaggctgaggcaggagaatcacttgaacccaggaagcagaggttgcagtgagctgacagagtgagactccatctcaaaaaaaaaaaaataaatcaatgctagaggaaaagaatgtgtcccttcccataggaagagggctttggaagcctgtgcctgttttccttcagactttgccccgtgcacttcttgtctttgctgattttgttttgtatccttttgctgtaataaaccaccaacgtgacaataactatatgctgaaccctgtgagtcctcccagcaaatcactgaacctgggggtagtcttggggaccctggacatgctatgcaggcaaaggctacccagctatggaaggaatactattatagtcccactctattatagtcccactctatatctgtgacatatagaggctcaggattgtcaagtatacttttcaaaagttaaaaacatgagtcaaatacaagaatgagcaaatgtcaaatatttgttcaagtcataaatgagaaaaccagcagcacggtaaagctgattcaaagaagaagaaaggaccagaggttatttaggcactggagaaaaaagagttagaataagatttctggttaatgttctagcggggataaagccctaaattttgggttattattttttaatggacagaaattatttttatttttatccaacaaaagtttacaagttaacatgaaccttcacaaaatccaagcctttaattaaaagtaggtgacggtgcctggctaacacagtgagaccccgtctctacaaaaaattaaaaaatcagtggggtgcagtggtgcgtacccgtagtcccagctacttaggagactaaggtgggagattgcttgagcctgggaattcaaggctacagtgaacaatgatcacaccactgtactccagcctgggtgacagagcaagaccctgcctcaaaaaaaaaaaaaaaaaatgttggccaggtgctctggctcacgcttgtaatcccagcactttgggaggccgaggtgggctgatcacttgaggtcaggagtttgagaccaacctggccaacatggcaaaaccacgtctttactaaaaatacaaatgttagccgggcatggtggaacgtaatcccagctacttgggaggccgaggcaggaggaacacttgcacccaggaagcggaggttgcagtgagctgagatcacgccactgcactccagactgggaaacagatcgagactccgtctcaaaaaaaaaagtagatgatgagtcaaacaaaggtaccctaattaattaaatatcctaattaattaaataattcttgagtgagcccattaaacacagtgccccaagatgacattgaaagaactcactacgttttttgctttagattccaagtttccgattttttcccgtaacagtatcctgatggaatttggtcattggaggtcccaggactcggttggttgctcagtggccgggcctgccctgtagttgctgcctcaccaaacactgtaggtgaatcaaagtaacatccaaggtgaggaggtattttgagtgcattttctggcaggacacgtgtagttggggaccaggcacgtggagttcacagagactttctggtgatttcaaatcagaggaccatctggccctgtttttgtatttttccatctcagatccagcatacttcaaagcaaacatgagactctcctggactaatccattttcagagaagaaaatcactccccaatttgtatgctgatggattagagaaaaatgttgaaatggctgatgtcaaagaagtgatggagttaaggtgctcctagcaacagaaactcaccctgatggaatgaaaaccatgctttttagggtgctgtgctcccacgggttctagcacacacagcactgggctttcaaccctctggggagctctgctttaactgcctgaattagacttttaagattaattatatgacctatcatcatttccaaaatgacagacatggcccaatcatatctgtgtggttgtgaaaatatacttagattgtttgctgcaagattgttttttgagtgctcctgtgttatatttactcctcactgcaatcatgaagacaagatattatccgcacttaacagataagaagactgaagctgaatcaggctaagtcacatttcctaaggtcatatagaaagtggcagagctagcacagaagccgtggtttttctggcaccaaagtctaagcttttggcaccatatgaacttcctctcataaagcaaagaaacggaggtattgactatacgttttgaaaagaaacacggaagactttttacttttctaaaatccaaatgccagagtgctccagttaccaggatgtttcatgctttcgtgagagccagagaacaagtcagaaactaccatcagggctctattaagaacaaaagtgaagtggatttagggtaagtagcagtttggccacacattgtacccactggctttatgtatttgctatctaatggagtggtggtagatgacttgggatacagcagcgtcttgtatcatcaaagaaaggttgaatacacaaagggaactttagtattaaatatattttattctagtggcaaaggaaaaagctatatccagatattagtattgtttctgtttttttttttttttttttttttttttttgagatggagtctctctctgttgcccaggctggagagtgcagtggtgtgatcttgcctctgcaacctccgccttctggggttcaagcgattctcctgcctcagcctcccaaatagctgggattagaggcatgcgcaccacacctggctaatatttgtatttttagtagagatggggtttcaccatgttggccaggctggtctcaagttcctgacctcaagtgatcctcccgcctcggcctcccaaagtgctgggattacaggcgtgagacactgtgcctggctcagatattagtattaaacagatgatgtctcccatagtacaactaattcagaagcaggaacacaagctaggcagttcaattttttcactctttcttccttcacttattcattcacatattcatatcacgtctatggagtaccttcaatagtcatcaccctgtaggaacaggaaaataattattagattcataattcatagggactgtgtaaatagttattcatgtcagatttatattaggtcaataatattttctatttaaaatgattgcggctgggcacagtggcgcacacctgtaatcccagcactttgggagggcaaggggggtggatggctggagctcaggaattaaaggcctgcctgggaaaaatggtgaagccctgtctctaccaaaaatacaaaaaacgtagctggtcatggtggtgcatgtctgttgtcccagctacttgagaggctgaggtgggagaatctcttgaacccaggagtcagaggcagcagtgagctgagatcatgacactgaactccagctgaggcaacggagtgaaaccaggtctcaaaataaaataaaatgactggaaaaagttacttcattagcatggcaaatacttccacaggagtatttacccaagtctgaggcctcattgaatcatggcccagcttctttctcagggagtggggccctgtttctaagggagtctgagcaagagcgctgagtgcagtcatggacatgtccgtccctttctgatgtccctttcccccatgagccatctcggaccactcagatgaatgatggatggtagaacaacaaagcagaaataattcagttctgtggcctgtggagtaccatcctagcccaggaatttatgagagaaagaatcaacttctatgtagtttaagccattgttacttgagtctgttacagtttctgttgctgtaagcacattacacctcctccttaatttatttttaaaaagcaaacctggctaggcatggtggctcatgcctgtaatccgagcactttgggaggctgaggtgggtggatcatctgaggtcaggagtttgagaccagcctggccaacatggcgaaaccacgtatctactaaaaatacaaaaataagccaggcgtgatggcgcacgcctgtatcccagctactcaggaggctgaggcaggagaatcgcttgaactggggaggtggaggttgcagtgagctgagatcaaaccactgcactccagcctgggagacagagtgaggctccgtctcaacaacaacaacaaaaaaagtgaacctatctttccatggcagaagaatcacctgcgttttctgagcatccatgccttttgaagaagagtatgtatctgcttgttcactaacggcgttatgtctctcaaatgagaaagttctttgtgtatgctcaagcacttcacttgcacatgccattgttcttaggagtaaagtatgttttagacattcctgaaagccagatgtgcaataccttctttctttctttttttgtctgtggacactagattttgctatgttgcccagggtggtctcaaacccctgggctcaaataatcctcctgcttcagcctcctaaagtgctgggattacaagtgtgaggcaccatggctggcctccttctttcttataaatccagtcttctgtagtcctccatctgtgttgctttcttcactatggtaacccaggcaattactcttcccatcaatacttgcctgtcctttgaaagtaggaatatatatctatatatctatatctatatatatatatatatttttttttttttttaatagtgacagggtcttgctctgtgacccaggcattatagctcactgtagccttgaactcctgggctcaagcgatcctctgcctcatcctcctgagtagctggagctacaggcacacacacccatgcctggctaactttaaattttttttgtagagacagtcttgtcattttgcccagaccagtctcgaactcctggcttcaagtgatcctcccgcctcagcctcccaaagtgctgggattacagatgtgaaccactgcacctggcctacattggtgttaacatacttcagcaggccagtttagcagtgtgtatcaaaaaggaaaatgggcacaacctttcacccagcaatcccactttcaagaacttaaagagataaatgaagagctgtaggcagaaggttcttcattgtaacttgttcaaaatgacaccgaactgaaatcaaccttttgagagacactcccggctgtcttcccaacatccacttcccccattcctgctttataacagacccctcaatccaccccaccatgtgcttcagggggactagcctagctccagagggcaagtcctgattggtccatgtcagtatttctcaaagatggcactgctggcattgtggacaggatgatccattctgtaggctgccccaggtgttgcaagagcttgagaatttcaagtcccctggacactgaatgctaccaacagcctcccaggtccagattttcctccgtacacacatctcgtgcaccctggagaactgtctcccctgcaggtgagaacctcttgtctgagccagtcttgggtgagagtatgccccgtctcccttaccagtaattcgcataagcatggtggtgtgacctcatcctggcgagttaagtaggagggcctctgagcaagatatcctagcttcagtggaagggccaggaagagatggtctgctgttcatcaggacattgtgtctgggtggggtgcctagaacagccacagccatctctcaggcttgtggggtgcccgagaaaagccaacatgctggggtgacagagcagaaagagggaaagaactgggttcctgatcttggttaactttggagctgccttgtcaggtcaaatatatttcttctttctctttttcctttttttcttctcgtggcacaaagcacacaacatacaatttaccatgttaaccattttatgtgtgcagttcagtagtgtgaagcatattgacattgttgtgaaacagatctccagacctttttaatcttgcaaatctgaaattctgtacccatcaaacaacaattccctttctccaccccccagccgctagtaaccaccattcatctttctgtttctgtgaatttgactacttcagatatctcatgtaagtggaatcatacagtatttgcctttttttgtgactgacttatttcaagtagcatagtgtccttaagattcatccatattgtagcatttgacaagatttccttcttattaaggctggataatattccactgtatggatatactatatttgtttatccattcatttgtcaacaggcatttgagttgcctccacctcttaatcattacgaatagtgcagctttgaacatggatgttcaaatattctttgagaacctactttcaattcttttgcacatatactcagcagtaggattgctggattatatggttgctgggttattacttctattttttattttttgagaaacctccatattgttttctatagcagctgcaccattttacagtcctatcaatagtgcacaaggagggctgggcatggtggctcacatctgtaatcccagcactttgggaggccgaggtgggtggatcacaaggtcaggagtttgagaccagcctgaccaacatggtgaaaccctgtcactactaaaaatacaaaaattagccggatgtggtggcgcgcgcctgtaatttcagctactcagcaggctgaggcaggagaatcgcttgaacctgggaggcggaggttgcagtgagccaagattgtgccgctgcactccagcctgggtgacagagcgagactccatctaaaaaaaaaaaaaaaaaagtgcacaaaggttccaatgaaataacacatttctttttttgaaatggagtctcactctgttgctcaggctggagtgcagtggcatgatctcggctcactgcaaactccgcctcctgggttcacgccattctcctgccttagcagggcatggtggcaggcgcctgtaggcccagctactcggaaataacacatttcttaaaagtttgagccattttgagttccatgcaacgaaaaaacatcccaactgatccagacctaaatattcgtcaatagaaaaaattgtttaggggaattacaatgcatatattagctcttagcatctgcacatctattaatagagaaatactgtaaatccatgatacactgttaagccaaaaaattggcttctcacacttattcctttggcaatattacctgagccccaggtactgtgttagatgctgaggattcagtggtaagcatgagagacacaggtagaagaacacagcttaccaggcaaatagactcattgaaagtagccagaagattatgagagaaaacccacaggacaaacatgagaaaaacagggagcaggaacacctacttttcttggtgtggacagagaaggtctatctgaggaggtggcattgaagctgaatacctaaaggcaggagaggagtgtgttgtacaaagagtgaatgaatgtagaggaacctacctgttccaggtggagcaagagcagatcctaaagtcctgagctagcaaccaaagactatttgaggaatttaaaggtggtcagagtctggattgttaagactttatattctaagagcatcactttcatctgtgcctggagaatggattggagaaggacaaaggggaggtaggaagaccagtgaggaaggtgtggtagaaatccaagtgggaaagaatggtggagcaggatgctgcaggagggatggagagaagagggcactttgggataggttttggagagggagaagatttgctgatggacgagatacttagggaatggggaagagagcaatcacaggttacttctggctccagtaaacaagtggagccacttatttaagtggggattttccaggtgcgatggcccatgcctgtaatcccagcactttgggaggccacggcaggcggattacttgaggtgaggagtttgagaacagcctggccaacatggtgaaaccccatctctactaaaaatacaaaaattagctgggcatggtggcagcacctgtaatcccagctactcagaagtctgaggcaggagaatcacttgagcctggaaggtggaggttgcagtgagccagaacgagccattgcactccagcctgggtgacagagcgagactctgtctccaaaaaaaaaaaaaaaaaaaaaggtatgactcttatggtggagtatgaagggcttcggggttcattgaacaccaactggtgaattgcagttcaactctggcaggaatcacctggagttagaacagatcctgcaagtttaagggtacgtttcccaaaaagattgcccctatttcaggtgccaaccacacttgggtgtccccaaaccacttgcacttcagaccaactggctacacagtcaggagtatccatgactccctagggttgataatgcactagaatcactcatggaactgaggaaagtgctgtaattatcatttatagttttattataaataatacaaattaggaccagtcaaatgagatatgttaggcaaggtctgcgagagtaccaaacacagagcctctgtgctttctccctgcggaatcagggccattaccctcccagcacatcaatgtgttcagcaaccaggaagctcaatgaagcttcaatgtccagagtctttcctgggatttcatcatgtaagcatgactgattgaatcattggccacaggttgaactcaatctctgtcttctacccctcccacaggttgggctggctcagacatccagtcactattggtctttccagtgaccagctcccaatctgaattgtcttgttagtaaactcaggaataatcaaggagctcatgaataacaaagatactcctgtctcttgagaaattccaagaatttttaaagctccatgccagaaacccagaattaacaaaggccaaagtctttattgtaccataggggtgaacattttgaattccattttaagtatgttaacttttttttttttttttgagacacaggtttactttgtcacccaggctggagtgcagtggcagtgatcctggctcactgcaacctccgcctctcggtttcaagtgattcctgtgcctcagcctcccaagtagctgggattataggtgcccaccatcacgcctggctaatttttgtatttttagtagagatggggtttcaccatgttggccaggctggtcttgaactcctgacctcaagtgatccacctgcctcagcctcccaaagtgctggaattacaggcgtgaaccaccacgaccagcccaattttcccttttttagtcttattctttcaggagtgcacaatggagttttccaggggctccgtgacatatagtgacttcattgctctgatattcatatgtaggggatttattattgctatttttaaatgcattgataaatccatgttaactatttctcttagttaaaaacagtaaacatttttagatataatccacctaaacaaaagctatactttgtgcccaataatttttaagaatgtaaagggatcctgtgatcaaaatattgagacctgctgatttttcaaaaactcaaattttaccagttgttccaataataagcttttccttttcttgatttttctggccaggataccacccaggttaatttagttttcctgtcttttttttttttttttttttttttgagacagagtcttgctttgtcacccaggctggagtgcagtggcacgatatcggctcaccgtaacctccgcctcccgggttcaagcaattttcttgcctcagcctcccgagtagctgggattacaggcatgcgctgccatgcctggctaatttttgtatttttagtagagacggggtttcaccatgttggccaggcaggcctcgaactcctgacctccaatgatccgcccaccttgacctcccaaagtgctgggattacaggtagttttcctgtcttttaaaaagtccacggctgggcgcagtggctcatgcctgtaatcccagcactttgggaggccaaagcgggcagatcacctgaggtcgggagttcgagaccagcctgaccaacatggagaaatctcatctttaataaaaatacaaaattagccgggcgtggcggcgcatgcttgtaatcccagctactcaggaggttgaggcagaagaattgcttgaacccaggaggcagaagttgtggatagccaagatcacaccattgcacttcagcctgggccacaagagcaaaactgcatctcaaaaaaaaaaaaaaaaaaaatcctccttaattctcggaatcctacctggttattttgtagaatgttcctcaatttatttttgtcctatgtttcatcatgattggattcaggttatacattatttggcagaaataccacaagattgatgttgtgtccttcccagtgcaatatcaggaggcacatgatgtcttgttactggttatgttaactttgacaacgttattaaggcaatttagtattcagtatttaacaaacaagcacactagtttgtagtcttttctgggcaagtgagggtttcttctcaatttcagtgccttttctacgcccaccaatgctattagtcacctttaaggtgaagactgctgagatggaattatttttagcaatgataataatttgttggggtaatagttgtacagccctttgctgccatctaagcacttttacgtggtttggttcatttaaatctaacaacccagtgagggggccaattagtagcatttatattacatgagaaattagaattctagaatcacatacctatttattatcatgacatggctaagtcgaattaatagtgagataggtaaatggctattttaggcagcagatccttttgtatgtggtatctgaaaagccactgaggcaggaagacaaggaagaagaatttgggaggatctgcgtgcagaggagtggaagaggaaagaggaatacaattagaaataggattcaggctgaatttaaaggcttagtgatgacgggttcttaggttcgggtatgtgggagaaaaaaaccagcatagagactaccttcggggcagagtgggttctgggcactgggtaggggctgggcccgggatggggggatcaaagggctctggcgggacccagatgtggatggggcagggccgagcgtggggactgggcttttcaatgacgggcggggttacggttgggcagcaggtgggcgtggcaggcataggcggagtcaatctatgagtgggtgggcctatcgccaggccgagagtgggcgtggccgacgtggggtgggtagcagccgaccgagtcggaccggccagttgggcgcgcttccgggtgtcacctccagagggcgccggctgcggagccgccctcagagtcgcgaggccggacgcagcgcggcgccgccccactcgccccagccgccgccatgaaggccgtggtgcagcgcgtcacccgggccagcgtcacaggtcagtcgggcggggccgggcccgggaggagccgcccctgacccccgcgaccggctgtcttgcgtggggggtcttcctgcgccatccttggggccgctgcggcccctccgcgagcctggtccccttcgcgagctcggtccgcgcagccgcgagtccccagggccggcttcggggcagcgcggcggccggagagccccctgcacgtgcccgaccggccccggcgcgcccctggcttccggctctcggcagagggtgcaggaccagcgcgcctcattctcagcacctttgtcctgcgtgcgggatggcggagcctcggagcatctccgtggtccgctcttcagggagtgttgatgaaccacgcttagagcatttccggagcaggcactcctcccttttcactgctgtattttaaatgttcaatttttgcccatttttacgtattccaatttttatggggcttgactcaggatgaaatgcacagatgcggagagttgctccttgggctgagctttgacagttgcgtgcacgtacgtgactggagcctaggctggatgaggggcgccccctgcccaggacgcccctcgccctcgcccgctgaactctgcgcggaggggtcgggatctaaagaattcaagatgaaaacatttctctttttcttgtggaccaagctacccgacccctggtcatcactcagcactttcgtctcggttgggcatcagaggtccagatgattagtgtagataaagtagtcgttttaagaaaaccacggtacgaaagatattttttaaaaaacatttaaatgacaagctttatattgtctttagtcttttctgtctttattggcacaactatattgtttcagttcaaataatttcagatatcctgtccttggagccagtctgcaccaaatatgcgttcttgtgtccacaaaagtatgaattaaaaacaaaacaggccgggggctgtggctcacacctgtaatcccagctctttgggaggccaaggcgggcagatcacctgaggccaggagttcgagaccagcctggccaacatagagaaaccctatctctactacaaatacaaaaattagccgggagcggtggttggtgcctataatcccagctactcgggaggctgaggtaggagaatcgcttgaacccgggaggcagaggttgcagtgagccgagattgtgccagtaacctccagcctgggcgacagagcgagactctgtctcaaaaaacaacaaacaaacaaaaccccaaaacaaaaaacaaaacaaaacaaaaacaacaaaaaaccctaaagaaacaaccaaacccaccaaaaccgtatatttaaatctaagagtctatttttcaaccccgcctaatgatttctaagctgttctggtagctttggttttggaaatggtcctggaataatagggaatagagtagcactgggatttaggaattttaaagcttttataacatttctgtagatatttaaattcatgaaaactgggaaaattcatagatgaaagatgttttgcattattgagaagaaccttgcagtctgctgctgtgtgtggtcgtcactgacagatttaaattttgatctctctcctgaactctccatcctgctaatctggaatattgaaaatgtgtattctgtgagatgtgctgaataagagtttgggttattttggttcactatttaagttatatgctttcagttaaaacaaccaaacctgcatattaaaaaagataagggtgttaattatgggaaagtgtaaataattcgggaattctgggttggggaactgtggaattctgttagaagggccctccacttatgcaggccttctagttgcattgtaatggaaagggattttctgattcctttaaaatgtggctggtttcactgaaatgtggctgtgtttgaatggcattttattttaggggttctaaaatgttaacttcctgttttatggtcaggacagcatagattatcaggagtcacacattttattttattttaaaatagttggttgacttcacatttattttaaatttatgcatttatggtttgtttgttttagagatggggtcttgctctgtcacccaggctggagtgcagtggcactattatagcttactacaacctcaaacgcttgggctcaagtgatcctttagtttcagcatcctgagtagttagactacaggcgtgtgccgccaccgctatgtccagcttaggagtcacacattttactatgtggtatattcaatttatgtgattggtcaaacacatttttttttatagtaaccctgtaatatcatttgatgcccagtccatcagatttctccaattggctaattggttttgtttttgttttgagagagtcttgctctgttgccgaggctggagtacagtggtgccatctctgatcactgcagcctctgcctcctgggttcaagcgattctcatgcctctgtgtcctgagtagctggtcttacaggtgcgcgccactgtgcctggctaatttttttgtatttttagtggagacagggttttgccatgttgactaggctggtctcaaattcctggcctcaagtgatttgcctgcctcggcttcccaaagtgctgggattacaggcatgagccactgcacccagcttgatcaaacacattttgatgccttaggttgggtactgtgataatctaatttttaaaagtttattatggcacatttcaaacatattaacagacggaatagggcaataacccccatgtcccatcattcattgtcagcagctaaaatttgatgtctgtgaacagtgttggaagaggatctaaaatgtttgggtttaactaggttaacttcaaaggttatgaattcttgaagtagagatctcaggtctgatgccactagtaggtagaaaaattgaccaaacatctcagtcttttccagccctttgatcttttgttcaaagtggtgattctcagattttttcccttggtgatccatttacttataataaaaaatccttttgaatctcctagtccttctacttgtccctggaggggggacaaaactgctccaaaataagacagcagtctctgtgtcatatatagactttgggccataatttgtttcatgttaagataattataaaactgtcaaaattctttgacagtgattctagaatctaagcagataatcctaactgtagaaaaggctttagtgtacgaagattttcactacactgttatttactgaggtgaaaattttgaaagaagccatatgtccagcaagatggaatggttaatcagtctacttgatgagctgaatctattaaaaggtgtttaggaaaaggttatgacatgaaaaaattcttatgcaatattattataaaaatttatatgcaatgttattatagtagttgaaaacaaatatgaattaaaatgtatgaatagatacaatattaaaaggaaatcattaaaatattaaagtacttacctttgttctttttttcatgtttctcatattttctaaaatatataatccttactttgatgatagatataacttcatgacctttattttttaaaacatactttgggaaaaatttagaaagtatatcaatattgtaagaaagtaatgttgatttattcaaagaacaaataaagccaaaggctttttctgaagcaatgcaaatgagcaaaccaacccccaattgtttactgcctatgtcaggatagattatttctatttcagcttttgaggcagtggctcaaaggacaataagtcacacacacatagttcattataagaaaagcagcacagaagaaaagatttaaaaaattttagcctaaaaataaagaaattaagcattactgatatttcaggaatggattgatgtgctctgctgggatctgaatagcaggtggtctcttgccattgcaactgaagaaagagggaagtttctcaccctttctttagcagtgtattgtaacatgacatagtctatgttactgtgttagttatatttatagctattaccctgcagaagcaagcaaacagcaagaaaatggctgaggtgacccttctattccgattagcacattaggtcagtacaagatgaagtagtaaaataacataatctaataagattggcaaataattggcaaaaaatagaaaattttcaaaagcaccacttgaaatacagatttagctgggtatgatggcgtgcatccatagtcccagctactctggaagctgaggcagggaggattgcttgagcccaggggttctgggctatagtacactatgctgacctgctgtcataccaaagttctgcatcaatatggtgagttcccaggaccagaggaccatcaggagggatggaccaacctaggttggacatagagcaggtcagaactcctgtgctgattagtagtggaattgcacctgtgaatagtcactgcactccagcttggacaacatagagagatcctgcctcttaaaaagaaaaacaaatgaaaaaaaaaacagggattctccatcataaagatgcatcttttttttttttttttgagatggagagtcactcttgtcacccaggctggaaggctggagtgcaatggtgtgatcttggatcactgcaatctccaccttctgggttcaagcgattctcctgcctcagcctcctgagtagctgggattacaggcgcccgccaccatgcccggctaatttttgtatttttattagagatgggatttcgccatgttggccaagctggtctcgaactcctgacgtcatatgactgcctgcctcagcctcccaaagtgctgggattacaggcataaaccaccatgcccggcccataatgatgcatcttgctaccatttgaggtatcgtctagtggtagtagggcatacatttggttataaatacatatacaaatgttaggagtgtgtgcttagagccttttttttttcaaatggacaagatgcatgattgaaaaatatttggagatcattggcttagaatgtaaccacaaaactaaactgggaaataatagcagtttggtgagttgaagcttaatacataaattgtgatttttatgtattatgtatttgtcctcatagtaagtaggaaaatcatttatgatatgaacattttccactttgtgcttcctgtatactgtgttaccatattttttgatattctgcaaaaggcaggaatctcttttctgagaattaatatagctgagctggcttctctgggggaggaaaacacagttctgtttttatagatgggcaaacttgaccatagaaaattttgggtgtcttacccaaggtaacatagatgaaatatggccctaagatcctgcttaatggttgttcactttacagctcccattcattccagagataaaatcagaatggatgggaattattatcatctcactgcatttatgtaactcttttcattttcgaatacgtactgactttaaccaaagaagttataagaagtatgtatgatgtttaaaatactcctatggttacttaaaagtgctttatgaccttgtttggttctgagttcttctctcccttttggttcctttctagttggaggagagcagattagtgccattggaaggggcatatgtgtgttgctgggtatttccctggaggatacgcagaaggaactggaacacatgtaagatgcatttctgtcattgctgtttgagtgggctatgtggtggtggtcatgctgggaacttccatagtactttgtgcctgtgaggtgagcccctgtcacttttaaccattgtcccattggatgtagtatggttatctccgtgtttcagagaagaccgaggaagaatgatttaggagacctcaacgctaagtcagcctttgagcaggagcaccgcctgtcccctgtctgtttgctactgtggcctcagagcatgcctcttgttctcttaacgcaaaaaccaagcctcttttcttatgtttggtttctcttttttaaattgggcagttatctgggcactatgtatttttagaatgtctactagctcgctgtgcacatagggatctagaactcagagaggttaaattgcttgccccagatcatgcacacacacttagcaaaaagcctgaaccccagttagagtctgggctccctgaccttgaagccagtgatctttttactaaggtggtggcgggggttgaggagcaggggttgccattgctgctgcctgcctggctctctgagtttatagatgggcaaactcgactatagaaaggtttaggtgtcttagccaaggcagcacagatgaaatatggccctaaaatcctgcttaatgattgttcactttatagctcccattcattccagacataaaatcagaatgtgccctctgtgcacctcctcccctccattaccacggggcacatttactttagatgctggatccatttattctgccccttggtgctcagagcttgggtataaccctgcccaactgattcttttgtgttagattgaaaatcagacttgaaactgaattcctgctaaggtgttgatgatggataactatcattcaatactatttcagtgatggtggtattttagtagctgtcctctggatactcaaagaagtggtagagtggtgtaatggctaaaaactgaggctgtgggtttgaatgtctttatggctctgacatactacagagctaatacttagcctggtgcttaagagatgtgattcaacataagacaaatcttggctgtggagagggggtaatgagtagcacctgtccctgagggtgcccatattaagagtcagttaattagtatttatagagtctttgaaactgtcatctacttaacatcatccagaagggtggctctcaaatggtgagatttcagctttcatgctggtggttctctgctgtgcttctcaaatctgaccctatagatgtcacctggtcaactttcttgccatggtgactatccttcttcacatgtatagggaaagcccctctggggcttaaggagcttgtgacatagttttcaaggtgtctttctccagatctttttgcatatttgcaataaccatgatttttctctcagtgtatttgctgaattgttctttcttttttttttcttttgagacagagtctccctctgtcacccaggctggagtgcagtggtgcaatcttagcttactgcaatctctgcctccctggttcaagcgatttttgtgcctaagcctcctgagtagctgggattaaaggcgcccgccaccatgcctggctaacttttgtagttttagtagtagagatggggtttctctatgttggctaggctggtcttgaactcctgaactcaggtgatccacccactgtggcctcccaaagtactgggatttcaggcatgagccaccgttctcagccgaattgttcattttgagtagctccaagaaggggtttaaaaatggatgtcatttatcctaacatgatgaattcgttcatgaaaaattacaattggacccatgttttgacatatccccgacctaaaggagcagagaataggtggttgtcatcttagccccagttctcaccagtagctgctatgaactggagcgactggcaaaaaagaagcaatctcaaaacaaccgtgtgaggtagaactgttattattctgtatcgcagctgaggacactgaagcacagggtggataagtgacttgcctgaggtcatgcctcctgtcagggatggagtcatcattatgtccttatttgaccggaagctggtgacatttttggggtatggagtgtgttggggggcttgtgatctctcaggtagctctcactgctctttttccccttagggtccgaaagattctaaacctgcgtgtatttgaggatgagagtgggaagcactggtcgaagagtgtgatggacaaacagtacgagattctgtgtgtcagccagtttaccctccagtgtgtcctgaagggaaacaagcctgatttccacctagcaatgcccacggagcaggcagagggcttctacaacagcttcctggagcagctgcgtaaaacatacaggccggagcttatcaaaggtaagcaggagagccacatccaggaacgggtctttgggacactcctggatggagagaaaaaagaagctgcaactgcagcatctccttttctggaaagtcattgtttatgcttgttacttacttagaaccacatactagctgctgctattgctgctgttgtacttaacacatgtcctcagaatgcttctgctggcatttgccctcctcccttcttctgttcacattttgaaaatgtttgggaacccagaggtgtggctaatacagtggtatttctttgattgtttagcttagccctgtccaatagaagtatagtgcaagcctcaaatgtgagccaaatatgtcattttaagttcttgtagccatatttaaaaaaataaaaagaaataggtgaaattaatttaaaaaatatattttatttaactgaatatattcaaaatatgattttactatgtagtcgttataaacaatgatgaggtagtttacattctcttttttttttttctaaataaaggctttatttgattagagcagttttaggttcacagtaaaattgagaggatggtacagagatattccatatatctctgcccccgcatgcataggctcactcattatcaacatccaccactagagtggtgcatttgttacaactgatgaacctaagttcattgttggattataactgttgttcatggcacatcattatcacccacagtctcctgttggcactagggttcactctaatattctctgggtttgggcaaatttataatgacatgtgtctaccattacagtatcatacagaatattttttattttatttttatgattttgtttctttttctgttctggcttctcaataagcttttttgacctagtctcatagactctctcttttagtagatgagagaaagtgtgtgtgtgtgtgtgtgtgtgtgtgtgtgtgtgtgtgtgtgtgtatagagagaaggagctatagatggtgtttttgttctcctaatggttatttctaagtttttaacattcatgaatagttacaaaaatttctatcaaaatttataaggatcttagtatatttgaacatccccttttcctttctagttccactttttaaaatgactttattaagatataatacacatactgtacaattcacctatttaaagtgtacaagtcaatttttttagttaagagttgtgcaaccattgccacaatctaattttataacacttttgtcccacttaaaagaaatcctgtactcatcaacagtactagcctactcccactctcttctttgttgccccagtcctaggcagccattaatctactttccgtctctttagatttgtctattctgaacattttatgtaaatggaattatataatgtgtggttttgttcctggcttctttcacttagcataatgttttcaaggttcatccatgttgccacttttcttttcatcataatcataatcacttttaatcataatttatttataatctgtaactggctgtatttgataatatattttatcaatttctgtggtcaccaacctgtcttgcttccttctttgggctcttctttctgaagtacattctatgatatatcagttgtttactaagaatgtgttagtggaacatagtcattgtaggttttaaaatgtttttattttgccttaattctttatgattgcttagctgggcatggaatcctagcttgacagttcttttctcccaacattttgtctttttttgtaaaaaaattattagtatactttaagttctggggtacatgtgcagaacgtgcagttttgttacataggtatacatgtgccatagtggtttgctgcatccatccacccgtcacctacattagttatttctcctaatgctatccctcccctagccccccacccctcaacaggtcccggtgtgtccatgtgttctccttattcaactcccacttataagtaagaacatgtggcgtttggttttctgttcttgtgatggtttgctgagaatgatggtttccagcttcatccatgtccctgcaaaggacgtgaactcatccttttttatggctcattgtattccatggtgtgtaggtgccacgttttctttatccagtctatcactgatggacatttgggttggttccaagtctttgctattgtaaaaagtgctgcaataaacatacgtgtgcatgtgtctttatagtagaatgatttatagtcctttgggtgtatactcagtaacagtaattttttttttttgagatggagtcttgctctgttgcccagactggagcacagtggcacaatcttggctcactgcaagctctgcctcccgggctcatgccattctcctgcctcagcctcccgagtagctgggactacagacaccagccaccacacccggctaatttttttttgtattttttttttttttagtagagatggggttttaccatgttagctaggatggtctcgatctcctgacctcgtgatctgcctgtcttggcctcccaaagtgctgggattacaggtgtgagccaccgcgcccggccagtaatggtaatttttagtgccctaaaaatcctctgtgctctggctattcatccgtctctcttccctaactcctgtcaaccactgatctttttactgcctccatagttttaccttttttagaatgtcatatatttggaataatacagtgtgtagccttttctgattggcttctttgacttagtagtatgcatttaacgtttctcttttcatggcttaatagctcattttgtattagcactgaataatgttctatagtctggagataccacagtttatttattcacttactgaaggatatcttgattgtttccaagtttaggcagttatgaataaagctgctataaacatctatgttttcttattttttatgtattttattttttgagatggagttttgctctgttgcccaggctggagtgcagtggtgtgatctcggctcactgcaacctctgactcacgggttcaagcgattctcctgcctcagccttccgagtagctgggattacaggtgcgtgccaccacacctggctaatttttgtatttgtagtagagatggggttttggcatgttggccaggctggtctcaaactcctgacctcaggtaatccgcccacatcagcctcccaaagtgctgggattacaggtgtgagccaccatgcctggccaaacatctgtgtttatagcaggttttgtatgtatataagttttcagctcttttgtgcaaataccaagaaatgcaattgctggacttaataagagtatgtttagtttgttaagaagctgccaaactgtcttgcaaagtggctggatcattttgcattcccaccagcaatgaacgagagttcctgtggctccccattcttgctaatatttggtgttgtaattgttttggattttggccattctaataggtatgtagaggtacctcattttaatttgcatttacctgatgacatatgatatggaacattttttcatatgcttatttactatctgtatatcatctttggtgaggtatctgttaaggtctttggcccattttaaaaaattggattgttttcttactgtgttttaagagttctttttatattttggatactagtcctttatcagatatgtcttttgcaaatattcaacttgcaaatatttatcctttatcagatatgtcttctgtgaatattcaatttacaaatatttatccttataggatatttcttttgtaaatattttttctcaatctgtggcttgtcttttcattctcttgacagtgcctttcatggagaggaaaattttaattttaataaagcttagcttatcaattcttattttcatagattgtgcctttggtattatatctaaaaagtcatcatcctacccaacataatctagattttttcctgttatcttctaggagctttataggtttgcattttacatttaggcctatgattcatttcagataatttttgtgaagggtctgtggtctttgtctagaggcgcttttttgtatgtggatatccagttattccaacatcatttgttgaaaagaccccttgctccattgtattgcctttgctcctttgtcaaagatcaattcactgtatttatcagggtcgaattctgggctctctgttctgttccattggtctgtttctctcttctttcattgataccacactgtcttatttattgtagctttattataagtattgaagtcgtatagtgtcagcccgttaactttgttcttctcttttaatatttttttgaccattctgggtcttttgcttccccatgtaaactttagaatcagtttgttgatatctgcaaaataacttgctggatttagattgggattgcattgagtctgtagatgaagttgggaagaactgacaccttgactatattgaatctccctgtctatgaacatggaatatctctccatttctttagtgctctgacttctttaatcacttctttaatttttctcatatagatattctaattttttttaagatttatacctaagtgtttcattctgaggggtgctaatgtaaatggtattgtgtttttaatctcaaattccacttgttcattgctggtatataggaaagtgattgacttttgtatcctgcagtcttgctgtaatcactgcctggtttcagttttttgattttcttcttggatgatcatgtcatctgcaaacaaagacagttttatttttctttttatttcttgccttatttcattagctaggacttccagtccggtgttggaaagagtggtgagtggggatatccttggcttatttctgctcttagtgggaaagcttctagtttcccactgttaagtatgacgtttgctgtaggttttttgaagatactgtttatcaagttgaagatgttctccccggccaggcgtcgtgcttcacgcctgtaatcccagcgctttgggaagccgaggaggtcagatcatttgaagtcaggagtttgagaccagcctgggcaacatgggaaacccaatttctatgaaaaatacaaaaattagccaggtgtggtagcacgcacctgtaatcccagttacttgggaggctgaggcaggagtatcgcttgaacgtgggaggcgcaggttgcagtgagccgagattacgccactgtactccagcttggatgacagagcgggactctgtctcaaaaaaaaaaaaaaaaaaaaaagcagtctgacagctttgaagagagcagtgggtctcccagcacgcagctggagatctgagaaccggcagactgcctcctcaagtgggtccctgacccctgacccccgagcagcctaactgggaggcaccccccagcaggggcacactgacacctcacacggcagggtattccaacagacctgcagctgagggtcctgtctgttagaagaaaaactaacaaacagaaaggacatccacaccgaaaacccatctgtacatcaccatcatcaaagaccaaaagtagataaaaccgcaaagatggggaaaaaacagaacagaaaaactggaaactctaaaacgcagagcgcctctcctcctccaaaggaacgcagttcctcaccagcaatggaacaaagctggatggagaatgactttgacgagctgagagaagaaggcttcagacgatcaaattactctgagctacgggaggacattcaaaccaaaggcaaagaagttgaaaactttgaaaaaaatttagaagaatgtataactagaataaccaatacagagaagtgcttaaaggagctgatggagctgaaaaccaaggcttgagaactacgtgaagaatgcagaagcctcaggagccgatgcgatcaactagaagaaagggtatcagcaatggaagatgaaatgaatgaaatgaagcgagaagggaagtttagagaaaaaagaataaaaagaaatgagcaaagcctccaagaaatatgggactatgtgaaaagaccaaatctacgtctgattggtgtacctgaaagtgatggggagaatggaaccaagttggaaaacactctgcaggatattatccaggagaacttccccaatctagcaaggcaggccaacgttcagattcaggaaatacagagaatgccacaaagatactcctcaagaagagcaactccaagacacataattgtcagattcaccaaagttgaaatgaaggaaaaaatgttaagggcagccagagagaaaggtcgggttaccctcaaagggaagcccatcagactaacagcggatctctcggcagaaaccctacaagccagaagagagtgggggccaatattcaacattcttaaagaaaagaattttcaacccagaatttcatatccagccaaactaagcttcataagtgaaggagaaataaaatactttacagacaagcaaatgctgagagattttgtcaccaccaggcctgccctaaaagagctcctgaaggaagcgctaaacatggaaaggaacaactggtaccagccgctgcaaaatcatgccaaaatgtaaagaccatcgagactaggaagaaactgcatcaactaatgagcaaaatcaccagctgacatcataatgacaggatcaaattcacacataacaatattaactttaaatgtaaatggactaaattctccaattaaaagacacagactggcaaattggataaagagtcaagacccatcagtgtgctgtattcaggaaacccatctcatgtgcagagacacacataggctcaaaataaaaggatggaggaagatctaccaagcaaatggaaaacaaaaaaggcaggggttgcaatcctagtctctgataaaacagactttaaaccaacaaagatcaaaagagacaaagaaggccattacataatggtaaagggatcaattcaacaagaagagctaactatcctaaatatatatgcacccaatacaggagcaccaagattcatgaagcaagtcctgagtgacctacaaagagacttagactcccacacattaataatgggagactttaacaccccactgtcaacattagacagatcaacgagacagaaagtcaacaaggatacccaggaattgaactcagctctgcaccaagcagacctaatagacatctacagaactctccaccccaaatcaacagaatatacatttttttcagcaccacaccacacctattccaaaattgaccacatagttggaagtaaagctctcctcagcaaatgtaaaagaacagaaattataacaaactatctctcagaccacagtgcaatcaaactagaactcaggattaagaatctcactcaaagccgctcaactacatggaaactgaacaacctgctcctgagtgactaccgggtacataacgaaatgaaggcagaaataaagacgttctttgaaaccaacgagaacaaagacacaatataccagaatctctgggacgcattcaaagcagtgtgtagagggaaatttatagcactaaatgcccacaagagaaagcaggaaagatccaaaattgacaccctaacatcacaattaaaagaactagaaaagcaagagcaaacacattcaaaagctagcagaaggcaagaaataactaaaatcagagcagaactgaaggaaatagagacacaaaaaacccttcaaaaaatcaatgaatccaggagctggttttttgaaaggatcaacaaaattgatagaccgctagcaagactaataaagaaaaaaagagagaagactcaaatagacacaataaaaaatgataaaggggatatcaccaccgatcccacagaaatacaaactaccatcagagaatactacaaacacctctacgcaaataaactagaaaatctagaagaaatggatacattcctcgacacatacactctcccaagactaaaccaggaagaagttgaatctctgaatagaccaataacaggagctgaaattgtggcaataatcaatagtttaccaaccaaaaagagtccaggaccagatggattcacagccgaattctaccagaggtacaaggaggaactggtaccattccttctgaaactattccaatcaatagaaaaagagggaatcctccctaactcattttatgaggccagcatcattctgataccaaagccgggcagagacacaaccaaaaaagagaattttagaccaatatccttgatgaatattgatgcaaaaatcctcaataaaatactggcaaaccgaatccagcagcacatcaaaaagcttatccaccatgatcaagtgggcttcatccctgggatgcaaggctggttcaatatacgcaaatcaataaatgtaatccagcatataaacagagccaaagacaaaaaccacatgattatctcaatagatgcagaaaaagcctttgacaaaattcaacaacccttcatgctaaaaactctcaataaattaggtattgatgggacgtatttcaaaataataagagctatctatgacaaacccacagccaatatcatactgaatgggcaaaaactggaagcattccctttgaaaactggcacaagacagggatgccctctctcaccactcctattcaacatagtgttggaagttctggccagggcaattaggcaggagaaggaaataaagggtattcaattaggaaaagaggaagtcaaattgtccttgtttgcagatgacatgattgtatatctagaaaaccccattgtctcagcccaaaatctccttaagctgataagcaacttcagcaaagtctcaggatacaaaatcaatgtgcaaaaatcacaaccattcttatacaccaacaacagacaaacagagagccaaatcatgagtgaactcccattcacaattgcttcaaagagaataaaatacctaggaatccaacttacaagggatgtgaaggacctcttcaaggagaactacaaaccactgctcaaggaaataaaagaggatacaaacaaatggaagaacattccatgctcatgggtaggaagaatcaatatcgtgaaaatggccatactgcccaaggtaatttacagattcaatgccatccccatcaagctaccaatgactttcttcacagaattggaaaaaactactttaaagttcatatggaaccaaaaaagagcccgcatcgccaagtcaatcctaagccaaaagaacaaagctggaggcatcacactacctgacttcaaactatactacaaggctacagtaaccaaaacagcatggtactggtaccaaaacagagatatagatcaatggaacagaacagagccctcagaaataacgccgcctacctacaactatctgatctttgacaaacctgagaaaaacaagcaatggggaaaggattccctatttaataaatggtgctgggaaaactggctagccatatgtagaaagctgaaactggatcccttccttacaccttatacaaaaatcaattcaagatggattaaagatttaaacgttagacctaaaaccataaaaaccctagaagaaaacctaggcattaccattcaggacataggcatggacaaggacttcatgtccaaaacaccaaaagcaatggcaacaaaagacaaaattgacaaatgggatctaattaaactaaagtgcttctgcacagcaaaagaaactaccatcagagtgaacaggcaacctacaaaatgggagaaaattttcgcaacctactcatctgacaaagggctaatatccagaatctacaatgaactcaaacaaatttacaagaaaaaaacaaacaaccccatcaaaaagtgggcgaaggacatgaacagacaattctcaaaagaagacatttatgcagccaaaaaacacatgaaaaaatgctcatcatcactagccatcagagaaatgcaaatcaaaaccactatgagataccatctcacaccagttagaatggcaatcattaaaaagtcaggaaacaacaggtgctggagaggatgtggagaaataggaacacttttacactgttggtgggagtgtaaactagttcaaccgttgtggaagtcagtgtggcgattcctcagggatctagaactagaaataccatttgacccggccatcccattactgggtatatacccaaaggactataaatcatgctgctataaagacacatgcacacgtatgtttattgcggcattattcacaatagcaaagacttggcaccaacccaaatgtccaacaatgatagactggattaagaaaatgtggcacatatataccatggaatactatgcagccataaaaaaggatgagttcatgtcctttgtagggacatggatgaaattggaaatcatcattctcagtaaactatcgcaagaacaaaaaaccaaacaccgcatgttctcactcataggtgggaattgaacagtgagatcacatggacacaggaaggggaatatcacactctggggactgtggtggggggggggaggggggagggatagcattggaagatatacctaatgctagatgacgagttagtgggtgtagcgcaccagcatggcacatgtatacatatgtaactaacctgcacaatgtgcacatgtaccctaaaacttaaagtataataaaaaaaaaaaagccattcctagtttactgagagtttctatcatgactggatattaaagttcatcacatgctttttctgtgtttatggatgtgaagatgtgatttttcttctttagcttgattgattaattgatttttgagttgaaccagctttgcatacctgggataaatcccacttgatcatggtgtataattctttttatacattgttggattctatttgctattttgttgaggatttttgtgtctgtattaatgagaggtattggactgttgtccaggctggagtgcagtggtgcaatcttggctctgcaacctctgccttccgggttcaaacgattctcatacctcagcctcctgagtagctgggatccaggtgtgtgccaccacacctggctaatttttgtatttttaatagagacggggtttcaccatgttcgccaggctggtttcgaattcctgacttcaagtgatctacatgtctaggccccaaagtgctgggattacaggcatgagccactgcgcccggctcttgtaatttctttatctggtttcggtattagggtagattctggccccatagaatgagttgggaagtacccccactgcttctatcttctgaaagagatagattgtagagaattggtataatttattccttaaatgtttgatagaattcaccaatgaccccatctaggcctggtgtttctttttgaaaggttattaaatattgcttcagtttcctcaatggatataggtctatccaaattgtctttttcttcttctttctttctttttttttttgagatagagtctcgcttggtcactcaggctggagtgcagtgacacgatctcagctcactgcaccctctgcctcccaggttcaagcgattctcctgtctcagccttttgagtagctgggattacaggtgcatgccaccatgcccagctaatttttgtatttttagtagagaaggggtttcaccatgttggctgggctggtctcaaactcctgacctcaggtgatgcacctgcctcagcctctcaaagtgctgggattataggcgttagccactgcacccagcctgtctatttcttcttgtgagagttttggcagattgtacctttcaagaaattggtcttttcttaatttcttttttttttctttgggaaccctgagaaactaagggaattggtctttttgtctaagtgatcagatttgtggatatagagttgttcgtggtatccccttaccctctttttaatgtccatggactctatagtgatgtcctctgtttcattttcgatattggtgatttgtgtcctcttttttttttcttagttatcctttctagaagcttattgactttattgtttcaaagagccagcttttggtttgattttctctactggtttcctattgtcaattgatttgtgctctattttttttttttaaaaagtttatatgctaatcttctctgtattgttccaattttagtatatgtgctgctgaagcaagcactctgctctaatttttgttattgcttttcttctgcttactctgcatttaattgctcttgtttttctagtttcctatgaaagaaacttagattattgattttagttctttcttcttttctaataaacacatttagtgctataagtttctcttttccccacttttgtgctaagaattttgtaataagtcttcaaaactttgtgtgtagtttatacttaacaattcggaccagccacatttcaggtgcccaatggccgtgtataggccatggctgtcatattggataatgtagatttaggtctctgcttacctgtttattcttgggtgtgccaacctagttcgactaatcaagacttagctagaaaatgtcttagaataatggtcctggttttcaggagaactgtgattctgtgaagactttaagggcgtcattcatttctagtttcttttcatgtttctggggataaattgcactaaatatcatcatattttacccttttcttcaaggttactggaaaacacattcataggtcttcatggagaaatacataagaaaaaaattttttttttaaattagaaaacatagcctcctttgttaatgcatttcattttgagcccttcctaagtagaatgtgtttttcaatgttgaactgcagtatctgttgctctagttacacccttttgtagacagttattaactttatttttttttttgacagggtctcactctgtcacccaggctggagtgcagtggtacgagatctccgctcactgcaacctccacctcctgggctcaggtgatcctcctacctcagcctctcaagttgctgggaccacaggcatgtgccaccacactcggctaattttttttgtatttttttttttagtagaaatggtgtttcactatgttgccaagtctggtcttgaactcctgggctcaagcaatctacctgacatggctgcccaaagtgctgggattacaggcgtgagccaccaagcccatcctaattgttaactctttagtgtttcctatgctctaactttctctctctggattaagcaaacccagattttttttttattaggcctactttcaaccttaataaaatttttgaaatttttttgaagctctgtagcagagcccacattgaggattgtcagctcatttgatgtgctcatgtttagatgggtgatattcctactcctccttggcatttccttttaattctctttctacttgtaaaaaatgtccatttgctgtaagaatacatggattctagatgaacagaacattcccaccttaattcaaatcccactcttacttgggttctgatagagcagaatagatttgcctctcctggaaatatccaaatttagaactccatttacaagtctggtcatggatgtctccagtggtttttcctaccctatgtccactgggatcctccaaagtggtttgctgcaaacatgtttcttcacagaatgagtaattaagtcaaatcctctgagtaattatttttcttttctgagacaaagattagatgctgccagcattgttcttctctgcttgcaggtgtttgtggaatcattccatttctgagtaatctcagatgagttttagaatgctctaaagtcccttgaaacatagatgaaagtaaggaatatcagaaaagcataagtgaaggcattttaaatgggtgaacatttatagttgttaaggaatgcttgaatgaaaggaaaactgctttcagtctgcgtttttaaagaggatagtttattattattgggtgtttgtattcctaaaaacaccttttatttatttctttttgacagagagggtcttgctatgttacttaggctgggcttgaactcctgggctcaagtgatcctttctcctcagcctcccaagctgggactacagacggtgtgccaccacacctggcatacttcttgaaataatgtatattttatctaggtaattatatgaagtgcctggggcaatcataaataattttataatggatcagaatttaagctcatggtgtataatacatctgatcattttgatgaaaaattgacataaattatacacagttttttaaaaggattttaatattacaatttaatgcattttggaaaagcaaatgtaaaatgacttgggcttaaaaaaccagaatttatggctgggtatggtggctcttgcctgtaatctcagcactttgggaggccaagacgggtggattgcttgagcccaggagtttaagaccagcctgggcaatatgacaaaatctcgtctctacaaaaaatgcaaaaaaattagccacacacggggttgtgtgcctctagtcccagttattcaggaggctgaggtgggaggatcgctttcacacaggagattgaggctgcagtgagctgagatggtgctgctgcactccagcctgggtgacagagcgagaccctgtctcaaaacaaaacaaaaaacaccagaatgtacaattctgtgaatagtcagagacaaatcatagaactattttgattacaagtgcaaagtaattttaatgttggttatagatttactttcttattcccctaataagagtaaaaaatcatggttagatgctacgaagtaggtggcaatgccttaaccttatgcatgttatcaggcccaagggccccttccatccttgtcaagggctaaccttttctcctttcatacagcatatacagacagttttaatcaaaatttatttccaaatgttttgaacttccagaagtcctacaattatatcaacagtgtgtcacattttcttttggccttgtctcttttacagcctccaatgaaacaaaattcatagagcatgcgttacacacttgctgtcttttgcttaattttgagaatttggcttccagctccagtatgaaaaggctctgtgagcccaagggatgttggaatgcagatgaaatgctaaatacattttctttattttaggatttttaagaccacttcagcaactttaaaacgtaaagtttaattagatttaacattttttcactcccttctcctttcctaagtgaaattttattttacatttatatttgatttgtttctcttatttgttgttagtgacagagagaagatcgttgtcccctttgttccttctctgtgttcctcacatccctgccagcacccatgcggttagggacatttcctcatctgccgcagctcttcccacatggtccctgctgtgatgcatgtgcccacagcaggccggctctcttcgttcctgttgttttatggcccgcttggtaatataaccccaagctctttcacttgttctgtatacagtggaaccctggaggggaagctagttatggtttggtcctcacgcatgtttttttaaaattattattattgttattatttttgagacggagtcttgctctgtcaccaaggctagagtgcagtggcacgatgtcagctcactgtaacctccgcctcccagattcaagtgattctcatgcctcagcctcccgagtagctgggattacaggcgcccacgaccgtgcccggctaattaatttttgtgtttttttttttttttttttgaaacggagtctagctctgtcgcccaggctggagtgcagtggcgggatctcggctcactgcaagctccgcctcccgggttcacgccattctcctgcctcagcctcccaagtagctgggactacaggtgcccgccactacgcccggctaattttttgtatttttagtagagacggggtttcaccgttttagccgggatggtctcaatctcctgacctcgtgatccgcccgcctcggcctcccaaagtgctgggattacaggggtgagccaccgcgcctggcccacacatgtttattattattgttagttaataacatgccaaaatacctctgttgagggcttgttatattccaggccctgtgcaaagcaaacactctttcattctttatctcgttgaatactcacaacaattctaagaggtgagtatgaggattactgccattctgtaggtgaggtgcagcacggtaacctatggaaggtcactcagcacgtaagtggcagagcctggaatcgaaccagcagctgtctctagaacctgagcttcactgatatctttgcttcactgtaaaattcacatcttcttggcttattggccttttctgttatctttctttttttttattttgcgacagagtctcactctgtcgcccaggctggagtgcattggcgcaatctgggctcactgcaacctcctcctcccaggttcaagcgattctcctgcctcagcctcctaagtagctggaactataggcgcctgccaccacacctggctaatttttgtatttttagtagaagcagggtttcaccatgttggccaggttggtctggaactcctgacctcaagtgatctgcacacttccgcctcccaaagtgctgggattacaggcgtgagccactgcacctggcccttttctgttatttttctgtatttattgagtctactgggactttcctgccttctccgtcatgatcaaggaaatcagcggaggggtttttgggcctcatttgggcctaggaaggggagcagtgtgccctgaggccagagtgtccttcctttctgagcaggatgttcatccaggattttagtcctgtttctgctgggggagatgttattggttccattcaagtcagttttgtaacttatccatcaataagacactttatctgtcagcccttgtgctaggctctgggtatacagtgccgagtaagagtgatgcagttcctgccctaaaggagctcacggtctagagaagagagatactaaactagtgtggctgtttctgccacagcgtggtaacattcctcagaaacctcctgctctgcgaaactgttgctaaaactctcagggcttatgggaaaaatggagttaatagcagaacaccaaagtcctgtggctgggttggaaggcagtaggcacttgttttttattttcataagatacttttaggggcttctgctgccagtgctgagggcttttctgctgaaggctgtcattttattcccactagtctggctctccttgtctgagaaaacccacctctgctgagatacagcctctgtggtatatgcactttcatttaccagttgtatatgagcgattctcctttcagaaacaagtgtcatcagaaccttctgaggtgactggtgtgatgcatactttgagggagtgttagggatgaataacagggttagttgctaaggtggtggctgcacatgtgcttgggcatgattttgtctgagctgtgtttaggtcatttgttgattcttcttgactcatcaaaccaatacccatgcagagtgttgttgatctttatgcttgtatgtgggtatgtactgttgcccctcgttgaatattgactggccactagggtgcatgctatttaaattggaaacacccccactgtttttcttttatattttacataaagtgtaaaagattggagacagtttcgccatgttgcccaggctggtctcaaactcctgggctcaagtggtctgcccgccttggcctcccaaagtgctgggatacaggtgtgagccactgcacccagcctatttttcttttaaaaactctctgagcctcttcttctattgtaatgacctggggcactggacagaccagcctcagagcagagatcaggttttcccagcatgctcctgctcaagcactgagcatcccacatccctagaaacccctaagtcctgggcaaactaggatggctggccaccctaagaagcagccctgtggcagtgcagttctcgggaaaacttgggccaggtgatatcctgaatgcattgtgtaaaaatgcactcctctttgcataggagacaaggtagggctaggatgaacatcggggcaggaggattagctgtctgcttcggctggagaaatgacagagttcacggccaggtccccagtaaagccgctggagtatccagctctaggcaggtgtgtgactggcctgagcaggttcaagaggttcagggacagacttggatggaggagtggaagagagaccacattgctgaaaaacactgttggcaatctggcaacttggtcatctggtgcactggctgacttctatgtttgttagcggcaaagacagccgggagagagatttaagctgagatgagaaggatgagagaagctgcaggctgtagtatcaggaagggttttttgtgtgggcccatttagaggcacttcctgtgtcccagcaagctccctaggcttgcacacattttcccttctccctccctctctcccttcctccttcccttcctcctgctcactctttcttccactctccttcaatcccttccttccttcctttcttccttctaaaacggccgcagtgtaccctcttcccctttctgctctcctccccctactcctcccaacttctcatccttggcctccccacgttgctgggctcctcccaacctggtggtctcagggcagttggcttcataacatggtgctggcttcctccacagtgagcattgcaagagcaggcattccaagatgggaatagatgtgctgatcccttcagaccaggcctggaaagtggcacagcctcacttctgtcatataatgttggtcaaagcagtctcacagcctaccccgattcaaggggaggagatacagtcccacgctgtaatgacaggagtgtcaaagagtttgaagccatctctagtcttccacagctcataaccctgctgctctcaaagggtagaactttcctcatttcatggctgtttctcgaatcattgctttaggggaaaaactagtgaatagtcctgtcatattttcccctctactgagaatgagctaaacgttgagggtgcattattgggtccccagactgagtaggcacaggaaactgggtcacttgtatcctcaacagcccttcagggatctccagccttcacatgaatgctgaaggccccatttggcaggaggcattgaacgctgtccaagttgagtgttaagcatgtattgcttttatagttagaaaaaaaacaagttataccaaaatggaatagtggagaagggcaacctttgctctcaagcttctagttccagctctgaggcatttgtaatgggctcagggaaacattcactagtcagctttgttcagcaaatcagaagctgctacagtattcaaaaggattacctgtatattctctgctgggtctgatttgttgtgggcatctaagagctagagaaatgtggacagacacgtcaggagggcagcagtttatgaccgcttctgctctgtgtactccatgggacgtccatgatgcccgtgcctctcccgcttcataatgcaaagagaaagtgccaggagctggaagaccacgtctaagtttttgttttgtgcttagtacttgatttctgtggatttgtttaattttctactctgtttactatttaaagcattttaacagcatgagtgaactttcagtggaagcctgttctatatactttggcaaagactgtgatgccaaaggcattatttttcttgtaaatttaggaaattataatgtgggatcgtgtcttcattgttaatgaatggcagggttggcaaactgtggtacaggctgttgctcttgtgtaaaagtttgacacagatgtccaactgattttggccaaatacatttatattttctctcattctttccttttctttcattctcttcattaatttgcttactgacttcattatttattcctgcatgtctcttttttggtcttacatgtaaatcatcttcacagctacaatgtagcatacctcttcccaaatggcaaactatatctactttcgttattaaaccctgtcttttcgtgatttcattgatttgcttagttgattgtctattgtgaacagcaacctgatcttgccagttctcccttcccctacctaaaataaccatggccaccctaaaagcaatgtcagccaccacagtggctcacacctataatcccagcactttgggaggtcgaagcaggagaatcacttcagcccaggagttctagaccagcctgggcagcatagcaagaccccatctctaaaaagaaaagaaaaaaagaaaaaaaaagaaaaaattagctgagtgtgatggtgcacgcctatagtcccagctaattgagaggctgaggcaggaggattgcttgggcccaggagttcaaggcagcagcaagctatgatcacaccactgcactctagcccgggtgatagagtaagaccctgtctctaaaaaatttttttaaaaaagcagtgtcagtggtatggtggggttttgcactcctgcactaatggcagcatgccttatgcacagtgggtgctttgtgattttgtgcaatgaatgcctctgggtctcaggagatgaggactggtccattttggtggctttgccatcctttctattctttccattctctctgggctctttccccctcctgtccttattctccttcctcacttttatctcatttcctgaatttcctccgcacttctggccatgaattgcaggatcagctctttctccttagccgagagtctatgatacaattcaattggaagaaataaagataatttttaaaagaagatacaggcataggtagaaagaaacttctgttcagtgttgttacaatccaagtaagtaaggtgacttgggatgaaacgaaaagtctgaatcattcagcaggaggaatgggaagagttcaaaaccttattgattcagggactacgaattcagaaaaaaattatatataatatatataatattagatatataatttttaataatgtgtatatataatataatgtatatacatatacacacacatatatatttgtgaccatatatatgagggtttacttctggactcacagttctagttcattgttctatgtttctgtacttacacagtaccatactgttttgattactgtaactttgtagtaagttttgaaattgggaggtgtgagtcctctaactttattcttctaattaatgattgaataggtagtaggatgaggtagttcagacatcaaaatgatatgaaaaggtctaaactggaaaggtttgctctcattcgtgtctctgtccagcctgtttttcttgctctctagaggtaattacttttattatttttttctatccatctatccatttgcaaatgtgagcaaatatgaattttaaaaatattcccctttctatacaaaaggtatgatgtgatgtactgttttatatcttggctttaaaaaaaaattcacagtgtgtcctagagattcttttcataccagttcatagagacttctttctttttttttctcttctattctgaacaaattaaatctctctttttaaactgctgtgtactgttctgtggcaggaccatagcctggcttatttaatagatcttgtattgttggactcctggattatttctaatttatgtctcttaaaaacaacagtgacatgatgaatacatttgtacatatgccacttcatatgcagtcgggagatacctgttggagaaattctcagaaatgggatagacggtgccagatggccgtttgtaggcaccgcacctttctgcagtgtgagactaccatatttctcctagctctgttggcagagtgtattttgaacttctagaatttcacccatctgatagatatcccattgtagttttaatgcacagagtgtggttggacattttttcagatgtttgactgacttatttccttttctcttaactgtttatgtgctttgtcctttttttgtttttgtttttttgtttttttttgagacagggtctggctctttgtcacccaggctggactgtagtggcatcatgatcatgggtcactgcagcctcaacctcccaggctaaagcaatcctcccacctcagcctcctgagtagctggggccacaggcatgttccaccattcccagctaatatagatataaaaattatatatatgaacacatctataatacatattaatacatatataatacaaaaattatatatacatacatatgtgtgtgtatatatgtatatgtatatataattatacacatatatgtgtatatatacataattttatacacacacacacacacacacacacacacacacacacacacatataatttttttttttgagatggagttttgctcttgttgcccaggctggaatgtaatggcgtcatcttggctcactgcaacctccacttccctggttcaagcaattctcctgcctcagcctcccgagtagctgggattacaggcacctgccaccatgcccagctaatttttgtatttttagtagagatggggtttcaccatgttggccaggctcatctcgaactcttgatctcaggtactcctcctgctttggccttccaaagtgctgggatcacaggcgtgagtcaccgtgcctggctatttttatattttgtagaaacaaggtctcactatgttgcccaggctggtctcaagttcctaggctcaagccgtcttcccaccttagcctcccaaagtgctgggattacaggcatgagctacctcccctggcctgttcattttttctgtcaagttatttgtcaggttctttatttctgtgagtgctttatacatgctatgagttgcagctatctttctctattttgtcatttgccccttgaccttgcttaagggactgtttgctgggtagacaattttgatccctaagcagtagattgtcaattttttgaaatgtctgctggcttttgaatcaagttttctatgactcatatgacattttctactccaaaattacaaagaaatttggctatttttgcctctcctcctttttttgtttttaatttttttttggagacggagtgtcactctgttgtccaggctggaatgcagtggcacaatcttggctcactgcaacctccgcctcctgggttcacacgattctcctgcctcagtctcccgagtagctaggactacaggtgcacaccgccacgcctggctaattctttgtattttagtagagacagggtttcactgtgttgcccaggctggtcttgaactcctgagctcaggctatctgcccgcctcggcctcccaaagtgctgggattacaggggtgagccaccgcacctggcctcctctcctgcttttatgctttcattttttactttgaaatcttttatctgtttgtagtttatcccatataaatgtaaagcatggattgaacacttatctttttcttcaggtatttactaaatggcttcccaaaactatttatttaaaaagcaacctttagctttactaactgagtttctggctttatcttctagtaaattcttgtatgtatttatgaacttttaaattttatttattatttttagtttttaattttaatttttaaaaacttccattcactgaaaaaatttcatttctatctattctttttgtctgtctgtcttatctgtatatatgctgaagacacactgttttagttattgaggatttttactatgctttcctaccaggtaaggtgaatttctcccacattgtcctttagagtttttcctagctcttcttaaatgtttattttttcatatgaatttttaaatcagcttatttacttccagaaagtaatcatgttatttttacctggagtgtgttaaagttatgaattcattaatcctctgggtccccgtattggacacattaagtttggctgcctgtttacatatcccctcttgggtacctaagagacccccaaactcaatgggtctaaccctgatctcttaatttcacttcctaaccccaacctatgccactgtgggcttacctatctcagttggtggcaacgccagccttctagtggcttaggcaaaaaacctctcaactgaaccaactaaattaatgctggatggaatatatttctttaactcttttgtatttcattttattcatttttatttttaaaaattttcctacagctttcataggctgactttctttttttcttttttttctttttttgagatagggtctcattctgtcacccaggctggaatacagtggcatgatcatagctcactgtagccttgagctcctgggctcaagcaatcctcctgccttagtctccaagtacctgggactatgagcatgtgccaccatacttaatttaaagaaattttttttaagaggtagaatattgctgtgttgcccaggctggtctggaactcctgggttcaagtgatcctcctgcctctcagcctcccaaatacctggaactataggtgcataccgccttgcctggctgttaactttttattttgaaataatttaggcttacagaaaagtttgacaaataataagattcatccaacttctattgataacattttacatagtacagttatcaaaatgaggaaattaacactgataacatactattgactaaactacagaccttatttgaattttgccagttgtcccactaatatccttttttctggtccaggattcaatccagaattccaaaccgcatttagttgttgcagctccttagtctctcccagtatgtggtgattaccttgtctttccttgtttttcatgacgttgccatttttgaagagtcactcattttgtcagtttgtagaatgtccctcattttgtgtccgcctgatgtcttctcatgattaaagttaggcatttttggcaggaacactacaaaagtgatcttgtacccttctcagtgcatcgtgttggggcatatgatgtcgacatgtctcattatttgccagatttttctctgtcaagttactgttttccactttgtaattggtctgtgttttgtgtggagataatttgagactatgcaaatatcctgttactcagcctactcccactcactaattttagcctccatccatggtctttgcctgtaacagttattactgaagtacttgcttaatcaatccatcttttttttgaagtaagtttattccatatatatatttgcattagaagtgtaaaaacaaattaggactttaataaaaatcttatgtatttttaagaatggttatattcttaaatgatctgtgtatgctaaaatggctgggtgaatctcattatcttggttagcattcaattactagatccagaacatcttggctaatatatttacttttttaaaaaaatttttttggccaggcgtggtggctcacgcctgtaatcccagcactttgggaggccaaggcaggcggatcacaaggtcaggagatcgagactatcctggctaacacggtgaaaccctgtctctactaaaaatacaaaaaattagccgggcatggtggtgggcgcctgtagtcccagctactcgggaggctgaggcaggagaatggcgtgaacccgggaggcggaggttgcagtgagcagagattgtgccactgcactccagcctgtgtgacagagcgagactctgtctcaaaaaaaaaaaaaattattttgctttaagttctgggatacatgtgcagaacgtgcagatttgttacataggtatacatgtgccatggtgtttgctgcacctatcaacctgtcatctaggctttaagccctgcatgcattaggtatttgccctaatgatctccctccccttgcccccgaccccctgaaaggccctggtgtttgatgttcccctccctgtgtccatgtgttctcattgttcaactcccacttatgacatctttttaaatacattgatttacttcctagggggtgaggaagataattcagggtgcctaagttacctgactgcaggaaaaagaggtccctacatagtcttcttaaagaagcaggtttctagccaaattaagagtttcatttttaaacaggaagggaatttcattttctccaggctttttcactaagtgttaacctgataaatgcatttcctaatcatgagccatgctgattaaaccttccctggccactgcatagtgttcttctaataaatgcctgcaagaaatttcccaagtgttgttagtgtagaatttttgcatctgtattcaaaggagaaatttgtctatgctttaaaaaaaattcctgtctaattttagtgtaagggtgatactggccttgcagaatagactagaaagctttacatcttttcccgtggtctggaccaatttaaatcacataggcgttactgtttaatagaacttgttagtgatctctttgggccggcttccttggctgttgccaaggaagtttcccaatatcccgcaagttcctctgggcagtgcactttacctgtcctctccttcacagctggattttccaacttattagaagacaattttatagaattttttttttttgtctgagatggagtcttgctctgtcgccaggctggagtgcagtggcgcgatctcggctcattgcgacctccgcctcccgggttcaagcgattcttctgcctcagtctcctgagtagctgggagtacaggcgtatgccaccatgcccagctaattttttgtatttttagtagagatggggtttcactgtgttagccaggatggtctcgatctcccgacctcgtgatccgcccgcctcagcctctcaaagtgctgggattacaggtgtgaaccactgtgcctagcaattttatagatttttaaaattattttgaaagatctctatatctagagtcacattaattttctcatgtcttttggttgtattttcctcctttttttcttaatcagcgtttttagttttttttgtatttcattgttttgctttaatcttcttcactcttttcacttcatcttcttcactttaatgagtgtgtgatttatttggtttcttttcctggtttcttatttcattcgggtttagtcttattttctaataatttggttttagtcttattttctaataaatgcacttatgggatgaaacttcagagtttggcatggctcctcctccccacatctgctctatcagcaaatcctgtttgcctcacctgggacatgcacacggaagctgagagcagaacgccgcttctgcacccaccctggcgcaggccgtctgcatctttcatctgaatttttgtgacagcctattaatgggcctcctgcgtccagccgggtctcctttcaggacatacccaacacagcagcctgagtgagccacttcccccatgtgttctatggtattataataacatacttttaagttaggaaaacttacagggatcactttctcttacttctcaacagtacttacaagaagaactgtgtgtgtgtgtgtgtgtgtgtgtgtgtgtgtagagacagaaaaagagcatgcacaatagagggcatgctactccagggactatggctcttgtcatgggagtgacaggaactgatggagggtggttctgagcagaggctcactctggccatgggggtgccctgtcagggaaggaagcctcaccaactcagaccagtctaccttggagcctatgttaggctgctcctgctgtcttttgtccttggaggctctgaactgggtcagaaccctgccatgaagcccttccaaggccactgtgctcccaaggtgaagacttattccctaggctgtttcccaagccgtgtccagccacagtgcccagcccagcacaccagagctcctgcagtgaggttaagtgacaatatactgcaatagtaaaatacataagaaactcataataaagtgccagcaacatggaaatgcactggatttgaatgcagaccctatcccattatcacagtcccagggagaaattacaggccaagattaattctgtaacataatcaaatccaaaagctttgaagaccgaaggaagtaagatatgaaatcatatcccaagacatcatgagctcagaagccacctcccctgctgttctttgtggaagggtggccatgctcgattgagtctgggttcatgcagcagccttgtccaagctgtgtctgagatgtgtcatacaggtgtccttgtaggtcctttggggggactcaaacactgcatcatccccacacaggcttccttgagcctcagttagacaaccatatagccttcaaccctacagagttatcccaggcagagtgatgtcaaggaccccagcagggcccagagatgtctgagcaaagtttgataatcagggagctccttgccttggatctcctgttatgcaagaaggctaccttaattgccttgaatttatgacctcaggatgtaggcatagttgggaatttaacttcccagctaaaggtaaactttggtcctagacatttaccgtcgtaatgtttgtttcttctcatggctttgacactctttagtttggaattgagggtggccctgttagtgaaaggtgccctcacttttccatagttaggtattttgggtcctccaatccttcttgctacaaagttccaggcttgagacacttgtttccaagaaatgaatctgttgtagacaccgccctcagatgtagataccacctctgcgctgttgcagagccaagtggagaaccctgataaggggagcccaaagcctgggaagaagccacaagagccccaggtctgcctttccacttccctccatggccctgagtgtggcatgcagtcagacctaggcctagccctcaaactgtgagaaaatcagctgccagggcctgaagggcctgtaatacacccatttgctgacaaaacagatattttcaccaccaagtcacttaggacttgtcattcctagagctactggtctctgcctaaggccccagagcccttgcctcagctttccaggcacctttgagccaggcgtctgctgctgtgttgtcccagtggtggttcactggcactggcccagcctctggggcactggggatgccaaggaacactcctgtctctgtagaagcagccctgtacttgaggtcagaaccaccatggatgctagcggcttccagagtcatactcccaaaggctctaggcacaatcctgcgcatccagatcaaactcctctagcaggcagtggctccagcctggccccaggcttattttgaacccctcaatgccactgatttgcttaatttcttgaggtcccagcctgtaacccactgttggggtttccatcagtaacagcctcctgcctgctcaggttctgaacagattgaaagtagaatgaagaggaagcctgtggggtgagaatgcctccttggtggcagataactgcctttaggggatgtgcttagatgggctgacctgaggcttactgtctagtgcccatgtcccatactggtccccaaaggttggctgaggtccagcccattcatggccacacagggccagctctggagagcagcgaatgtgggcttgctcccagccaggccaagaagcattggtacacgccttttgttctccccatttttctttcagagtatacttttttggcataatatttttctgtcccatccctgcaatttgcgcatatactaccatggacagtggtaggcatgacaatagtaataatagtgactatgatttcctgtacactcactgtgctgggctgtgtactaacctatgtgcacctttgtaaccatcccaggacaactgtcctgttgcaccagaacaaactggggcccggagaggtggtgtgagccttcttggctggtggctaaagtcagtgaagcattgtccagaggggcatggacaccagtttttgtagctacacagagaatctgcagggaggcactctggtttacagctgttagggccttgaaaagttctgctggagatgagttcatgggtggttagtctccagctgagagctttcctgctttaaacatgcagcataagcgtgtctaacatgtgcttaacctgcagctctgggtagaaagaaagctgggacttaatatttaagaacaacttgattatatcaccataggagcccagatgtcattttatagatatgcttttgtgtgagtgtgtgttttttttaaaatgtgtttattttctctggttagtataattctttttgggcgctttaccctttgatctggactggaaaaaaatgttaccattttaagatctcttaaaacatgtctttggatttatcatctgtacggatggaaattcacataatagttctattcttaactgaagaaaaacaggaaaagaaaataaatttctcactacttggaatgataaacaaggtgaagcatatactgtatatcctggcaacagaaattcaaggtcggaaataattcctgtcctcttgagcctgccttcagcctccctgaggagtgcagtgactgaaattttctactaattgtagccataattttagcatgcaattaaacacatgatttccttcccagctgatgtctttttagttagtctgacatggatgagacaaaagctctgttgatttgaacggccactttaatctgataggaggtcacggaaagtcatcattttttgagcacctttgactatccagtaggatctagattaatcttgcttataaacatggccaacagcttgggtgcttctaatacaatttccaatgctactgtctgtgggccaaagaaagctgtctgttggcatgcccattttgctgagtccttctgaagttagggacccactggtaggaaagactcagagaaggaatttgtgaggttgtggtggcaggaacagagactcatggaggtcacccaggttgcggaaggacctcagggtgtgaggcctgcctgtgccgcagtagcccaaaagcagtgccttccatggagggagatggagggcttcactgcatgcagtgcaaacatggccttccagaatgctctgtgtttgccttcccaccatgtacagtcccggtaacccacattctttcccacccttggtgttaccagaccttttatttcttgccaaatctgttgggcacgcagcagcctctgtgctacttaatcctgcatttccatccctcttacaaggctggctaacttttcctgtgttgagtggctgatcctcctcccggtcaacctccttctcccactgtgacccgggttttggatcacgctgatctaggtgtgtgatatggtttggctgtgccccacccaaatctcatcttgaattgtaactctcacaattcatatgttttgtgggaggaacctggtaggaggtaattgaatcatgggggcgggtctttcctgtgctgttctcgtgatagtgaataagtctcacgagatctgatggttttaaaaacgggagtttccctgcacaagctctctctctttttgcctactgccatccatgtaagatctgatttgcttctccttgccttccgccatgattgtgaggccttcccagccgtgaggaactgtgagtccgttaaacctctttcttttgtaagtttcccagtattgagtatgtctttattagcagtgtgaaaatgaactaatacagtgtgcttttggatggagtaatctggtgtctccatctttggtaactgtttggattgctttttcagatggcaagtttggggcctacatgcaggtgcacattcagaatgatgggcctgtgaccatagagctggaatcgccagctcccggcactgctacctctgacccaaagcaggtaagcctggagtctggtgcctggctccgtcccttgggtgcctgtaacatccctttagtccctggaagagtcctcggtctgaggaaatacatcattgttgcaacgttgtatttattttaatacctgccttcccaagagtgcatgtttacggtgcactcctgagtactgtggccggtgggtacagcacttctcccttgcctcgtcctgcctttgaattccagaggacatgtcctgtgcagagccaggttcttcccctgggcttcccttcccttggccaggtgccgtggcgcccacctgcccctgggtggcagcagagcaatggccctggattggccggttcacccattccgaatggttacctgaattgggtttggtcccaggtgtggatagatgtgccccccaaggtttgctgtaaatctccatttttctaaagcagtgtctgacctggatttgctgccaatttgtaagctctcatgaaataaaagttaattaaaatagagaaaggaaatgtgtaatagtccttggaacccgcgtggtctcatagatgcttagcatacttgtaaaggcttaattaacacactcactggatagagacacgtagggcctggcaggcagaggaagaaggactgagcaaacatttccattcttccttcccagtctccctcccttgctagcatgctgtgatggccagtgatgcggcagtaaggggacagcgtgatagaaacgtgaagctgggcaacctgttcaaagcctgatttttttttttttttttttttttttgagatggagtctcgctcttgttgcccaggctggagcacaatggcgccatcttggctcaccgcaacctccgcctcctgggttcaagcaattctcctgcctcagcctctcgaatagctgggattacaggcgcccaccaccataccctgctaattttgtatttttagtagagacggggtttctccatgttggtcaggctggtctcaaactcctgacctcaggtgatctgcctgccacggcctcccaaagtgctgggattacaggtgtaatcccactgtgctcggccttttttttttttttttttttttgagacagggtcttgctctgtcacccaggctggagtgcagtggtgcgatcatggctcactccagcctcgacctcccaggctcaagtgatcctcctacctcagcctcctaagtagctgggactacaggcatacgctaccatgctgggctaatttttgaatttgtgtagagagggagttttaccatgttgcccagggtggtcttgaactcctgggctcaactgatccacctagggcctcagcctcccaaagtgctgagattacaggcaagagtcaccatgcctggccaaagccagatttttaaagtggaacataatctttcttttttgtttctgtattagtttattctcatactgctataaagaaatacctgagacagggtaatttattaaaaaaaagaggtttaattggctcacagttctgcaggctgtgcaggaaggatggctgcagaggcctcaggaaacttacaatcatggtggaaggtgaaggggaagcaggcacatcttcacatggccagagcagaaataagagaaagcagggggatgtactacacatttttaaacaaccagatctcatgagaactcactgtcacgagaacagcaagggggaagtctacccccatgatccagtcacctcccaccaggcccctcctccaatgctggggattccaattcaacatgagatttgggtggggacacaaatccaaaccatagcagtttctgactctttttgtattgaggaacatgtctgatgtagtaggctagacttcagtggtagtaactgagggtcttggaatgactaatgacattaaaaaaatcacaaatgaaaagtccacatgaaaatgtaagctttttattgtgaaataatttgagacttacagaaaagttgaaaaaacagagtttccatatactttttaacccaactgcctctagtttcaatgtctacataaccatagtacaatgaccaagactttgaaattaatgttgatatagtactattatattaactatattacaaaccttatttgaagttcactaggttttttgtttgtttgtttgtttttcagacggattctcgctctgtctcccaggctggagtgcagtggcgcgatctccgttcattgcaagctccacctcccgggttcatgccattcttcggcctaagcctcccaagtagctgggactataggcacgtgccaccatgcccggctaatttttttgtatttttttagtagagacggggttttaccatgttagccaggatggtctcgatctcctgccctggtgatccacccgcctcggcctcccaaagtgctgggattacaggtgtgaactaccgcgcccagccaaagttcactaggttttttaaatgtcttttttctgctccgggataatgcaggattccacacggcatttagttgtcatttctgcttagtcttctccaatctgtgacagttcctcagcctttccttgtcttttgtgacattgatacttttcaagagtactagtctactgttttgtagaatgtttctcactttgggttttctatgattatattgaggtaatacatgttgacaggaataggaaatagcacagaagtgatcttgtgcccttcatagtgcatcctaccaggaggtatgtggtattgatttgtcttgttacctgtgataccagccttattacttggttcaggtgaagtctaccagatacctccatgttagatgaagtgctaacctctttccccttgtctgtcctctggctcattcacagcagacagctctctctcagctttgcagggaaagaagccagcagatggcattgactctgcttctctatcccccttctgccaccgtggtagcagagctaccctttcctgggctgagtccagcctctccctggggccaggaccagctacataatttgagaggcccagtgtaaaatgaaaatgtggggccccttgttcaaaaaatattacaaatttcaaggtggtgacatagagcataaaacgaaaggtggggcccctctgaagatggggcctgtgtgactgctcggctgtgggtctagactgacctgggctttggagcccttcccttccacctcctcagcagcttcctggaagcctctgtcctcttgttggttctgtctgcctctcacagtcatccatcttatcccattgggttttaaatatgcccaaatgtctccaattgagaaatgcttccatttcctcccttctgctctgccacagtgtccttgggtctgtaaaggttctcaccgagggccccagtgacctcacattgctttatttcatgcccatttttcagaacacttttcttgccactgctgcccacttttgcccctggaaatggctggagccttgtttcccaggacgtcattctctctgggtttttgtcttgcctctggctactccctctggttttatttgatcattattccatagtttttagttattattctgctttaactctatttggagaaaaattttagtctttttttcattctaaatatttttctggaaatggtagaatagtacattttgcctttagaatcttcacctttctttcaaccagtaccctcttcttgtttaggtcaaagggtacaaagatgcagttattttgggtgagtaagtctcaagatctaatgtacaccataaggagtgcagtatcatattgtgcactgggagtagatttaggaattctcagcacacacagaataaaggacggtaactgtgtgagatgctggacatgtaatttacttgactgtagtaatcacttcactatgtgtatgtagatcagagcatcatgctgtacaccttatacaataaatccctctccccaaatcaaaaaatcctcaagtaggcattttttaaacttctaacgagccatgttaacttataaggattaaaaaagacttttagttatttctgaatcctttaggagttttctcctcaaatacacaaattgtcttgcatcaacttcatttacatggaccagtttcctggcccccagaagcctcagaccctgaacattgcactgcgctctgcccctagctctccagtaggtggcggtgggtaggcgcagaagcggcctgtgttaggttggtgctggcctgtgcctggggcctctctctgccttttcttctgaattagaaggagtttcctcttggagcaaatagctaatttgcttgcttttgtgttgataggaggagcacagccaaattctttttactgatagataaacacgtgtttctatcaattaagcttttaattctcagtgttttatttttccattatattccaatcagtaatgaaaactgctacaattacattaaagaaaaatggttcttttggcaaatttcaacgttatagaaaaatgattcttttagcaggttcttttaaaatataaataagttctttaaactatctgaacaaatggatgatgtgtgtgtgtatatggatgtatatgtgtgcatgggtatgtgtgcatatgtgtatgtgtgtgtatgtgtgtgtgtatatgtgatgtgtgtgcccatgtgcatgtgcatgtgggtatgtgtgcatgcatttgtgtatgtatgtaagcaccaagtgtcgttttggtatttgatggtgtgctaggcactgtgaggaagagaaggaactgctgctgcccagcctgtgcagccggggatagattttgggcaacataaacctgaaaggttaatgacagtgaaagaggtggacagcataagacaacttaggaaaggttacaagaccattcagtttgtgctcctccttagaactcttcagtgccttccaagtgcattttgctgaagccttgcattccttgctgtcatttgccaaggcctaagtgaccaggcgtccgtggccctttcttgcctgctctgtggctgtctttccctccatccctatgcttcacctactgcatctgctgttgcctcctctcccttgctgagaagagggtcaagctctttcctacctcggagctcttgtctcaattccagggtctccccctccttctccaagaatctctgacccccacagttcccaggaagccccttcggctactctactctgccctgttgctctgatggtgtatttcacagacttcacaccatctgctatcatggtccacaccactcataaaactcaagctccctgagtgttgttcactgccctgtccagggaggtgtgtgtgggtgggaggggtggtgtttgtttagcagtggtgctcacagctggtgggctgtggtgtctatgaatgtcctgagttcagagaaggccattgtcactgctgttgcctctcagccgagtgggcctcccaggggaccggaggttttagctgacctttaaggatatggaaagtagaagggattcccaattattgttttcaaatttctacttcaaataagggtagattcttattttcaagaatctcagagctctacttatgtgatgcagctactgctggtgaagactgagctggtaaaggtaaccagcagtttgcctttctaactggaccgctgcttgtttgcagaactggctgctgcagcatctgcatgctttccatgcagcatacccatcacattataggctgctgcgtgggtttcatgctatgtcctggcagtgataagttggaaggagagcattacattcttgctccaaatgacatatttccaaagggaacaggacatggaagcagcagcagaaccaactgactgctgttttgcctggtgcattttttgcaggagaacacgattctggtaggaacatcctgcttattattacctagtgcatgattgctggtgcatgagctcttccattggtggctagatattgggagattttaacaccctagcctgccatttctgtgatagaagcttattcttgtcttgttttaatcttaagtgctctttctctgcgtagggcttgttttcctgagcctcacatggattggggggcagatggaggtttttcctggtgagaagggccattggtaattgaaggactcttccctggggcctagggcccacttagttcatagtgttgccattaattatttacattctcatttatttagtgccatcgaagccctcattaaattgaaatgctggaaggagctaaaaaaatgaactttcaagtatacatgtttgagttaacggacgtgtttattgacaaatcactgggatgagttggctagcgaaacacggtgccttcaattttacggagctattaattttacgctcctctgagtatcaccgttgctctgtccataattttctctgtatacttgtcttatcagcaagcattaatccctgagcctggaccttggaatgtcaagattgagacattcatggcttttgtaggatctgaaagaaatatgtagggtaagggggtgtgggggaaaagaattacatttggttttatttatttatacttccagtgacaggggcagccttttgattacctgctgtggaatccagaggtgaaatgaaggacacatgagcacacaggtggcttgcttctaccaggtggccccatcacaggtgcacagaggggagctctcacttgctgcatatttcagtttgggggacaaatcaaatgagaagtactctgaatataaggaagaattatgttgttgctaataactttgcatctcttcatggaagaacagttatttaaatgtactccttttcactctgtttttaggcttgaattctagattctagctccctaattgtggttggtttcagcttcagtgttcacatggcctgaaccaagctcgagttgttgacttgctgcaggagtatgttttaaagtctggttgccaagatggtagccagatcttgtcaattactccagaaatattagttcattttgtcatattaatttattgaacaaacgctgactgagggtccagctttgtttatgctgaagtatcaccaaaacagaagtgggaactcagcaaagcgtcctcattacagagttgttgctgttgtgcagtctttgtcagtgacgctgacttctgggacgtaggctgccacatggaaggcctcctaccagggctagggcgccacctggccagacctctcaccacacatggaatcacctggatttctgatcctttctgtctgagcacctgctttccatgaattatgagatcagctcagccctctggggagtgagttgggtgtagagatggtggagctcctgacctcactcagcccagcccactgctctgcacagtcagaatttatcctgagtccttgtcagtgcctgggggaatgcctgcctattgcatgaatatttggtatgaaagggtgggagcttagtagatgtttttcttcctggtggagagctgtaagggatcacttttatcactttaatttgtttccaaatagatggttgtcctaagtcagctcatagtgggcttaaaaagaagcctttacaaggctggcatgactgtctctttgttggggacccattgatgaattgattaatcaattgactttcaccttaccatcttaaatccatagcacaggttaaggaaattgcaaaaattgaaaagagtttttttctcttctactggaatatgtctggtaaattaaaaactaggatctgtttcttttctaccattgacacataagacatttctaatctccaaccagagcaaaatatctgttttgctttaaaccagtctctcaggacactaatggggtagtgcatttaaggtttaagggctttatttgtttgttcctgtatatgtgttttgggcagattcctagttattttaatcttataatctcatttgtgtgtgtgttaaaaaaaaacgaactccttaccttgctgacttgacctgccaaagattaacagcatcctttttattctgaagggagagaggtagagtttttccttccatggatttatacattgtgcatagcaataatttagttaaacagactcagtattttaattgggaattcttagcttgttaagtgatttaccaggagcttcacagtcccgggtaattgtagaaaaatgttctgccagtcagtggtgttttgcagaaaaccttgccgaaacatttgctttagtaatggagagagaatgaaagatctggaagtgatagaattctaaaaaatgcagcacttgctatactttttttacaggcatagataaaacccttatctacacagaggtgtttgccagcttgccgcagtataggtgtagtctgtaatgactgatgaggtagttatcttttttaatcttaaagagaaggttaggatgggtcagtggggtgtgagttggatcaagtagactcttaggggctcacagactggcctgagcttatcccacaagttttgtatgtgtggatgtgtgcaagtgccttttgctgggaaaaaggggaccaggacttttgtcacattctctggaggtcccaagaagtgaagaggctggtggactggggactgttgtgtgcagagattacacattctttctctatcaaagttatccaggggttggtggtagtgttcctcaaacggcagactgaggaccactggcatcaagccacccatggtgcttactaaaatgcagggtcctgggcccacccaggttttctgagccagagttcctggagtgtctggatgaggaaggcagaagagtagcccatttatgtttctaaccaggtctttgtgtgctcctaagcacactgacatttgggaactactggaatagagagaatcaggccttgcagtgatcatctgctccaggtgttggtttcttctggaccaccctgccctcccttcctcacccccaactgtctaaaaatactttacaacctatgttactgcagctgccaggaaacaagatggctttgcttgattattgaggtcacatgtgagtctgttcttattcatcaacgagccctcagtctcccaacaccccttccccctgccacacaggcagtgatgaaaatgtttccagaatatggtgccttctcaacgcaattacagatgtgtcagggaaaagccgatgcagcaacaacagctcaatatgttagtgactgatgatcagccgctctactgggtgacattgaggcatatgctggggtaataacttttttcctaggagagatgagcccaacatgtggattgctcaatgagtgtgcaagattgtagcagtgtagccactttaagacttgtagttgaaagtaatttatagttttcttggctttctgagtaccagacatggaatgccttactcatctgtcgaagtgttaatggaactagaataaaaacccagggtgatcgacatcttagcctctgcatggaaattgtagtttaatgaaattcatgaatgtggaggcttccatgggcagttagctgatcatttacatttaaacacacatgggaaattgttaagggctcatattttatgatgtattattacctattcagttcatggtaaaagcttttcacaatgaattgtagactagtttcctgcagattatttattgtttcatgaataagtatcacaattttttctcctttgtgtctctgctcatccacctgaaatgaactccttccctgtctctacctgctgacatcttccccatcttttaaggttcatttcagataggtagctcttcacacatgatgcttacctcagtgcccatccaggcgaggcctttcttcctgcctttggctccccatcacgtggtgtggcaaggatttcgtagtggtaatgcccttgaataaaaagctcatgctcatttgtttgtttgcttgcttgttcatttatccatttatccatccacccatatgtccctccatctgcccatccatccatccatccatccatccatccatccatccatccatctatccatccactcacctgtccactacctactcatccaatacctttatccagcagattattattgggtgcttgctctgtgctggccctgcatgtaggtccagcactgaaacaacattgtaccctcatgaagcttccattctagtggagaaacaaacaaaaacaaaaacaagtataatttaaaattctgatgatataaagaaatcaaacagggttaggtgtagagaatgctgttggctagaagtccccttaggtgcaagcgctagggaaggatgctgagataagagggagccagtgaagactgaaggaagagtgccagacagaggggtcagcagatgcagagctctagggtgactggtggaagaaaggccagtgtggctggagcttggagggtgacagggagaggggcagaacctgaggccagagctgtgacctggggttgatggaacaaggcctcatgggccaaggtaaggaatttggcttttattgttagtaagccaaagacctgttagaatgttgagagctctgatttgtgtttgcagagatggatgagactgggtttagtgtaggctcaggatcgggggatgtgtggcttgtgacagggtggcagagagggcatttaggagctgtggaaagattctggatacactttggaggccctcaaccactctcatattctgccttccacagtagagcttttctgtcagtgactcatgtttggttctttcatactgtggcttgagcattagagagtaatattgtaaagttcaacctcccacagttcactgcaggaatgaccccattcttgcctccaaggccagcatggtggagggattccatggcatgagtttctatgatgacatcagacattggacatcaaggagtgcgatgctcacccctggtttttagtgatccttgggcacagtctggacacaaaagccagaacttgtttgatggttttttttttaagaaaaaaaaaaaaaaaagcaagcaagttcagggaagcagtctcctttttcctggtcaacatgaagccaagtgtttcactattgcccagttttcccccaaatacaaaaacattaattttaaaaagatactgtaaaaagcccaagaaacatgtatattgaatttgatttatgtatactattgtagctaatattttcagggaaatttctaaatgtctgtcataggagcttgtcagaaaaagaaagatttatttttggaaaagtatgtttcctggtgttcattgagcttggaaattatggaaagtcattgtcagaagggaggcagctgctccagaggcggagtggaagtcaggactggagaaggttgtcctactgtgggctccagcgtgcctcttgctgctagctggtcaagagtctcgcagcagccactttatacctcactagctccaccatcgcaattatttctgtcaaaacgaaacacaaaagaatggcatgtctatgaatattcttcacagaaaatatattcgtttgactattttccataaaatgtgaagtcaatttctttttctatttttaatcatgaaagtgaagcccggaagcctcaatttctttgtaatggaaagatctgagtttgtggccttgtttccattttccacttctcctttgctaagtcaggaacatgatactcacataatatcccccgggcagtggctctgttcaggaattgcatggctgtttgactgcagagggagggcaaaggctattattaaccattcgtgtcattgttgggtcatgaaaccttcaggggataagtataagttctataaaatttcattttgaaatccagaccagatctggccttatgctctgaggatttttttttttttttaagtttcatgttgtccctttgccccccttcattttctcttgggaagagtctcttattatcataattactacttgaaaaaaaattccaagcaagaaagcagtgtattaactggaaagtaacaatttagaaatgttattttttaatagtaagcttttatagtattcctgggtagaaaggtatttttatagaaacagttattttcctatcttttttctcatgagtccataaaatagcatttttatatcaatttttgttatatctaatacataaaatcagtattcttttaagaatttagaagtttaagatacactaaaaatatttttgacaataactctcattctcagaggtagcgccgttaataagttctatgtatttacttccagacttaacaaaaatatgtttacccacatttacacatggtatctctgggtgggtatatgtcagaagatttttttaaattgtgtttaattatacataacctaaaatttttaggtatacagtttcgtggcattagtatattcacattgttatgcaacttttattatcaccatctatctgcagaatttttttttttttttttttaagacggagtctcgctctgtcacccaggctggagtacagtggagtgatctcagctcactgcaacctccatctcccagattcaagcaattctcctgcctcagcctcccgagtagctgggattacaggcatgcgtcaccgtgcctgactaatttttgtatttttagtagagatgaggtttcaccatgttggccaggctgatctcaaactcctgacctcaagtgatctacccgcttcggcctcccaaagtgctgggattacaggtgtgagccactgctcccagcctatctacagaattctttttatcttacaaaactgaaactttacccttaagtagtaattcccgattctcttctcccttcagccactggcaacggcccttctataatactttctgccttttgaatttgaccactctgagtatcatatgaataatcatatggtatttgtccctttgtgactggcttatgtcacttagcataatttcttcaagattcatccatgttgagccttatgttcatagcatgtgtcagagttttctttttatggccacagaatattctcttgtataccgtattttgtctatccattcgtttatccatgcacacttgggttgtttccactttttcattattgtgaatagcgctgctgttaacattggtgtaccaatatctcttcaagaccctgcttttaattcctctgggtaaatacctaggtacaggttgtggatcatatggtagttctttgtttaattttttgaggaaccactatactgttttccacagcgtctgtaccattttacattcctaccggcaatgctcaagggttctgatttccccacatcctcaccaacatttgctgttttgtatgtgtgtttgtgtgtgtgtgtgtgtgtgttttctgatactggtcatcctaataagtgtgaagtgtatctcattgtggttttgatttacgtttctctaatgattagtgatgttgagcatcttttcatgtgctccttggccatttgtatatcttctttggagatctatttcagttctttgcccagttttgaattgctttgtgttttttttattgttgaattgcagaagttctttatgtattctgtgtattaatttcttaacagatagatgatctgcaaatattttctctcatcctgtggattaccttttcactctgttggtggtgttttctgatgtacagaagtttttaattctgatgaaatccaattcgtctgtttttgcttttgttgcctgtgcttttgatattatatccaagaaatcattgccaaatctaaatcatgaagctttttctttatgttttcttctgagagttttatagttttagcttttacatttagatatttgatccattttgagttagttttagtatatggtataaggtgtatgatgtttttacttgcagacaggttgggagaccagtatcagggactttattttctgaaatcacttgagagtaagttgttggcctgatgccttctcacccttgaattcattagtatctttcctgcaaacagggacattctcttatagaagccccaaaacagctgtcaaaatcagaaaattagcattgacattttactagcagccatcttcagcctccataatttaccagttatcccaaggaggtcttttattactattattattaagtttattttcattgtctcaaggtctgctgaactctggatccaggctgtgtcagtagggtagtgtgatgcctcttgtacctatctctgcctcctacagttctttttatttattttattttattttttatcatagagacagggtcttgctgtgctgctcaggctggtttcaatctcctgggctcaagcaatattcctacctctgcctcccaaagtgctgagattacaagtatgagccaccgcacctggccaagttgtttaccctcttcagaaggcttagcttgcagtttcagcagaaggatcgactcccaggaagaccgtgagagagatttgggacccaagttgataatactaaatacactgaacttgagtgttttcaccatgttctggctctagggaagtgacagttgctagtgaggttggtgctattgtatgtgtcttctgtaccttgaagtccctcagagatcttgcccctggtcttcttgttctaaggacacaacaggttccctttttctctgaagatgaaatctagatctttgattttggaaccaaatttggactcttgactctggagcaccaatttctttctttcttttcttttcttttattttttttgagacagagtttcgctcttgttgcccagactggagttcaatggtgcgatctctgctcaccgcaacctctgcctcttgggttcaagagattctcccgcctcagcctccccagtagctgggattgcaggcatgtgccaccatgcccggctaattttgtatttttagtagagatggggtttctccatgttggtcaggctggtttcgaactcctgacctcaggtgatccacccgcctcagcctcccaaagtgttgggattacagttgtgagccactatgcccagcctggagcaccaatttatttagcaatttgttctctggaatcaatcccagggtatgggtttttcataaatgccttgttgagagtgcgtagttgagaggtgctgtaggtagtacgacaccgtctggcttctctaccaggttgatcttgcttatggctctggcttgactctaaagtctcaggtctgatctttcctggaatctgtgcctagctcttcgattctgaaaccaaatctggattctgggtgaatcttctgtattgatttctaaagcaagtttttgtttgatagcataatctgagtaaagtttttgattgaagctattgatgagaattttcaattaatcttctgtgaatttggtgcaactgcacctatgacttgttgctaccatcttgtgtgaagagttgtcttcagccatgctggaagagagtcccaagaaggtcttcatagtgaaaggatccagttcagaatcatgccttgtatttggttgtcatgtgtctttagcgtccttcattctggatcatttcctcagtctttccttgattttcatgaccttgagtctctggaagaatacaggcccattattttgaagcatgtcccttaatttgggtttgtctgatgtttccttaagattagattcagggtgtatgtgtgtatgtgtgtgtgtgtgtacatgcacttgtatgtgcacaggtgcttgaaagaaatggtcctatattgcctatgtttttgtgaaacatgctttctttcccaccccacaagggcatttgtgtgtttacatatgcagctagatcattcattttaactgcaagatgggattctgtcctatgaatatactgcattttgtgtagctattttccttttgatggatttatggagttggtcgcaattttttgctcttactaatgatgatgcaaaattgctttttttacatctccttttgtggatctagattttctaggtaatagaaaattgctcctttataatgtttgttattgtttttaaaatttgaagtatttcaaacatactagatctgtacagagaatggtataacaacacctcactttagcacatgttaatatgggctctacaatctttaagttggtagaattattttattcaataaatggctaaactgggagttttacagggacttgttctaagttagcatctcactgagtgagaattattgttaacgataaagttgcctcaaaactatgtagctttctccaagaaggagatattttgggaaaactgtcaggtttaacaaacagaacatgtatacctcccagatgtgacctgtgaataaaataccaggtaggctcagccaacttttcttttatgcttctttcatgtctttcttaatagaatttaataaaatgaaacaggaggaggaatcatcaaaggttaggaataatagacctgaaagagttgcttggaacctgtgtagattcatttctcatcttggttcctttacttggcatcaggtgagatgagacatccattcaggaattcattccaagtctatttcagtacccaggatagatttgagataaatcagttccatactgaggtgtgacattaggcaaatcaagggaaggaggaggaaaggaatcaggtcagagctcagcttactttattcaaccgtggcgtatggggccaggcgcagtggctcacatctataatcccaagactttgggagcccaaggcaggaatatcgcatgagcccaggagtttgagacctgcctgtgcaacatagcaagactccatctctacaaataataataaaaaaaaattagcagaatgtggtggtgcacgtttgtagtcccagccagtcggaaggctgaggcgaagaatcacttgaacccagggggttgaggccacagtgagccatgatcgtgtgtctggactccagcttgggcaacaaagtgagaacttgtctgtaaatcaaccgatcaatgaatcaatcaatcaatcacctgtggtacatggagttctataaagataggtagatagatgagagatagagagagagaaattcgggacttggagaggagtgcagcatcaggagttttattgaagcatctaattttcacctgcagaaatggaaacaaggaggaactggtctcctaatttacatacccgcagggagaaatctgtgtgtaactctagattgcagtgcccggagcagaagcagaggcatgtggccagttgtgtcttcctaccagttctggaaaaatgagatagacttagataccagctcctgcaagctttggaggtgtggcctcaatatctaaaatgaagtctctgtgtgcctgttgttgggtgtttttgtttttaatgcttaattgcattcctagaattcccaggtttgcctgttaatagtggaatactatacaaaggaaccacagaggtttcttaacatttacactacattggaatcctattcctggctgaaatggtgttttgcagaaatgtggcattcatttttatgttttggtacctgggttatgggtaaggataaaaggtctgtggccttcagcctgaaaaataacagcaacaacaggaaccacaaccgggagtcagtttggggctttgatgggttcctttttcatagtgttttaaggactatatatttaaaggcgctaaaaatgaaatgttagtattttagcatatggcagagtggacatgtttcagtcatcagtttaagattctgggcatagtgtataaatagtaattccgagggtattttttccttcatccttcctagagatgtagaatgcttggcatttgaaatgaggtcatccaaggccttggattgctgctacagatagtggaggcctgttgttaggcgtctacctcacatttgtgtccaaggccctgggagagaccaaagcagaagcgaggcctcactggacaggtacaaggcactggcaggcatggcacaccttcactatgtaccccgtctttgtggctgtcaacgcctgtgacgagttggcagctggctttggtctggcatttgttctgtaggtggctgaaatgcccatcatggaagaatgtcctcatgggtttgtaaggaaaggggctctccttgtgcagatgcctgctgctgtgcacacaccttcccatggagcttgtgggccgcatctcaagggggtcactgggcttcctgtagtcctgaatctaccattcaccccatctgtctctctgttaaaggctggggcaatacaaatgatgctgagtgtagttttgtcctttatttttcctcatgaaaacccttgaggaactaaaggaaggaaaagaggagtagcctaaagcaggtctgggagttgggtgcctgggaattctggcaggactcctactaagtgactttggtcacatcacagagcctctcagatttggtgttttcgtgtgtcaggttagagggttgggccaggtgatcctatggggcctttctggtgctagaaactggtgactctgtggtgttgacagttggccattcataggtgtgccttcctcatgtgccctcattggctgtctctgttgacagtgtttttccttagactttattctccagaaaaaacccacaacccaacatggttttgaaatctccactggggacccttaggaactttgcaggcatcagtctttgtatgctgatggaaatcagatgtcgagagaggagggcatgcatgttaatgagccatatggaccccattgcatttcaggctcatcagccctgaccttctgagatgaaccacttatatttggctttaacttgagctcagcagaacaaaataaagctctgacaatgggggaaaggaattccaactttctctgctcttctaatcaatcaagctgaaagtctcaaaggccaagtatttcagaaataacaaatgcaaataacttaattttcatcgcgaatatctattttccaaaatgtattggtgttttcattggctttgagtgagaggctcatttctgtacttgacccttaactttacatatagaaattggggtggttgcctccatttggttccttttaaataaatatttattaactacttttcatgtgccagatttctgtgtggtgggtgctagaaagagtgataagccatggtttttttcttcaagagcttgtcccttagtgagatggaagtcacattggggcagttccgagaggatgttatttgcctggtgctgagggagtgagtggaatacagggaggtttggtgggggcttggtcgtcagaataggtgtccctgagcacagaacagatgtcttagttgcatctcgaaggttgaggaagaggcagctgggtctgaaagcttggggcaagggtggtgcatgcccagaagatcaggacacgagcatggaggcttgaacctcctggggaatgaaagcaggtgagtctgatggggcaagaaggcagggggtggggaggatgatgaggatggagaggcagccagatgtggcaatgctgtgtcctggtaaggagcttgtacttttgttttttggcggtgggcagtgggcagccactgaggagggatttgcagtgaggggaaggtcagaagtcgtcctcagctgtgaccctcttgtagcaggatggcagatagattggactgggcaaggtaaaggaggcagaaagacctgaaaggtgagaactgctgcactgggccagggtagagaggaacagagcaggaacagatgggcaggggccaggggagagtggtgtcatcaacctagatggggcccacatcaggagcagggctttgaaaagatctcttctgttccctgaatcactgttggccctgcaggaccagttgttctctttgttcacctgatcccttctctttggtgctgataatctccctcaaatagccagtggcccttcattgttggctcatattatagataaaggaccaggtcacgggtataggaagctggtgcagtcttctctgataccatgggaggccttgctgggaggccaactgcaggatctgtggctgttggtgggcaggtgtgcttagtacttggtagctttgacctaagccactggttttcaaccttgaatgtgcattagaatcacctgagttgctgtgaaaattcccagtgcataggctgtaccccaagccaatgacaccagattctctggggatgggaccagagatggttgcgtctgcagctgagtttgggagcaatgatctgggatgtacagcgagggaccaggatgacaagagagtgcccagtgccttgcttggggacctttttcctaggtcatccataggctgaattagagcattttcaggtctcagtgtaaaatgaaaaatgccagactccttgttcaaaaagcagtagaaaagtacttttaaaggcactaaaaggcaaagcattttctcttctttcatctctctctcttcctcctccacttgtcatggtgcttctattttctattttaagtcattataaccaaggacaaataaaaaatttagattattggcgtgaattttaccatttatattgtgcagtgccagttttaaatgaaaatttaaggccgaggtgggcggatcacgaggtcaggagatcgagaccattctggctaacacggtgaaacctcgtctctactaaaaatacaaaaaattagccgggtgtggtggcaggggcttgtagtcccagctactcgggaggctgaggcgggagaatgacgtgaacccgggaggcagagcttgcagtgagctgagatcgcgccactgcactccagcctgggcaacagagaaagactccatctcaaaaaaaaaaaaaaaaaaaaaaaagcaaatttaacttgtatgtggaatgaccagaattacacagtttgtattttgtagctcctacatcatatgaatttcattcttaccagaacagtgggaactaacatattccttctttttgtctcacacatgtcctgccaccactgtcttgttcagttcactgatgagtcaggagggactgtcaggtcggggagccatgggtcgccttgtttgctttctgagtcagtatgtccaggggaagtggtggctaacacaagacaagactcgagcgagaaagactctgatgggctttctcagccattcatctttcttttttttttttttttttttttttttttttgagatggagtcttgctctgtcgcccaggatggagtgcagtggcgcgatctccgctcactgcaacatccgcctcccgggttcacgccattctcctgcctcagcctcccgagtagctggcactacaggtgcctgccaccaagcctggctaagttttgtatttttagtagagatggggtttcactgtgttagccaggatggtctcaatctcctgacctcgtgatccgcccgccttggcctcccaaagccattcatctttcttagaacaccattgctctttctgtgttcaaggcaagttctggttcagatggaaagtgtgagctcttggggctttcaacacccccttactcagttgtagaagtaacacgcttactgtaaatgtgagttgagtgtcgctgaacccccatgcgttgtgggcccacccagcgcggtgctcatggaatcccaagtgctatgctcagtaggcagcagagaaaggtgtcagacccccatattgtgtgtatcacctccgctcatgctcatgcgccacagtcctgttggacttcacctacaaaacacacattcgaaggtaaaattgggctggatgcagtggctcacgcctgtaattccagtactttgggaggtggaggcaggtggattgcttgagcccaggagtttgagactaggctgggcaacacagggagacgttatctttacaaaatttaaacaaaacaacacacaaaaaacctagcccactgtggtggtgcatgtctgtagtccctgctactcaggaggctgagttgggaggattgcttgggcccaggaggtcaaggctgcagtgagctgagactgcaccactgaactccagtctgggtgacagagcaagaccctgtctcaaaacaaaaacgaacacaaaaacaaaacaggtaaaattgttaacagtttctacatggctatagcagagtatttaactaagtgcagaaccagttgagtgcgaggccctgtgtgcttgctcaggtcacttgcctgtgaaatcagccctgtcaccctgtcatgttgcagcctatcacggccccgtcctccctgcccacatcctggccatccttctccatgatgaaatctgccctcctgctctgtactcctggcctgcacgctgagcaccctacttcatgctgcagctgccctgcactgaacccccagtgccccatgctgctccacttctgatttcctttgtcagacttatcttttaaaatattgtcactgtatctattggttagttactttttacatttattgtctcttttccctgccaaaatataagttccccaagggcagggatcttagaccaattatgggaaagcaagaggcagctcagaattgactatgtgctatttgctgtgtaaggttgtaacatgggataaagcaggcattacaaactaaaggcagatggaggatttctcagcaggtagtaattgggcaactggtggcaattatggaaaattaatgattttagatcctttatcccataccttagaataaattccagtggaattaaaaagataaatgtaattttaaaaaatctcacagagggtactggccttcctaaatataaaaatgtgttacaacgctctagtaatgcaacagatggtgctggcagagcaggagagaaacctattaacagactagatgaaagacctgaaagagaacctgattatttatgggaagttgagaatataataaaggataccatttcagagcagtggcaagaggtggattttcaaaaaagctgttacaacagctggttagtttttgtttgtttgtttggtttgtttgtttttagatggagtctcactctgttatgccggctagagtacagtggtgtgatcttggctcactgcaacctctgcctcccgggttcaagtgattctcctgcctcagcttccagagtagctgggattataggcatatgccaccacactgagctaatttttgtatttttagtagagaggggtttcactatgttgggcaggctggtcttgaactcccgacctcaggcaatctgcccgtctccgcctcccaaagtgctgggattataggcgtgagccaccgctcccagccaacagctggtagttttaaaaattgttggtacataatctgcctagctgtctttctgtggctcctttgcctccagtatattctgataaagagaggatttgtcttaacgctctcatgactgccccctttgagagttctgtcactgcatcttgctcctggccagcgttagaactttcaggtcccagcataggctgagccctgtgcagcttgggcccctccccaaaacggttcagtgaaatttttctggagagtggtctgagcatcaagacttttcaaagctctccaggtgattctaaactgtagctaagattgagaaccgtggttttagtaggctctggcatcctttgggatgccaaaagtccaagatctaggctaagaacactgccccaaaagattagggcatagggcttgccagattcttgtagctgggcagggatggaggtagatctggggtctttcaaaccagcccacttatttaaagtggacagaatgctttccagggtatgtgtccagaggatgagaggtagggccgttagccactggttcctgtccccattggcagttcaagcaggccagcaggcttccatggcttctgagaaggcctcatggcaaaaagacctgcagtgcctggtgaggagtactgactgtcagctgagctgaagctaacgtggaactgtctgcagtggttggggctgacatagggcgggcccagggggcagcatgcaggcactgagaagtgtctggatttgagtctttgcataaacttatataccccgtccttgaaattaagtgcacttctaggcatttgggggattcccaataaatattagctggaaaataatagctataaaaatattttctaaagcaataaaagaaaaatgccattttggttttattcagtttacaatctttaataaggtagagtaactcctaggattaaaagtcagtcacaatcttggacaacatttttactttctggtgcgtacttggctcctattcaggagctggcaggctgagtctggaggggcccatccagcttttagaccaaggcaggtgcagcctggagggcctcagaggaccaaaggaccctttcagggatacacgggtaacactcctagctccacttttgagcagtgggtctctacctgggctgccttgtcctgtgtagtcttaggggtctggcacccataagcggactctgctagctttgacatttccatcccgctggagcactttggtctcatttttgatgaagcactctcaactccagcttgtagacctgttttggatatcaggagtagcatccgaatttccatcagtatgaagcagtagaaagggagacacaataggaaaaatgctttgtagactgcaaaactctatgcagatatggggtgggactaaaaatagtatgataaattgtggatttttgctgaatttagaacagaatgatggatgctttcatgtctgtttagggactaaatggcactggggaatagaggagagagttgttcaggagcagttgttggctgacttgcttaagaaacagaatttttgccagtgtgtctgagacttcctgaagcaaaaagggatcacccagctgcagcttggggcttttagcaggtgggttgtggccacatggcattgacttaattaattaattaattaaagaacaggccaggcacagtggctcatgcctgtgattccagcactttgggaagctgaggtgggcatattgcttgagcccaggagtttgagaagagcctgggcaacatggtgaaaccctgtctctataaaaaattagctgggtattatggcatatgcctataatctcagctgcttgggaggctgcagtgggaggatcatctgagcgtgggaggttgaggctgcagtgagccaagatcgtaccaccaaactccagcctgggtgacagagtgagactctgtctcaagacaaacaaacagactcataaattagctgtctttgaactcaaatattagtctaaagtatgctaatatgtgaaagtaatatgttgatttttgagtgtgaaataagaatactctaaaaattaaagtaagcttatgaaattcaaataatttttacttattagtggcttataattactgtgaaaggtgtatgatctaaacagacaaatagcatacttgtttaacaattagacagtggttaattcataaacttctaatcagacatctgtctttggatagtagctctggcattctttccaaaagtttatttactagttaaaaatgaaatgttagaaagctgttgttttggaaatgtataattccaaaagtaaaccttgcttttgaaaaatgaaattgttatatgtgaaggagggttataataacagagcatcattgttaataaaaacacatttgagaacaaacagttttaaagtttcaaatccatgcacatgaccctcacagccatcatgagaggggaggggcatggggatggcctcaaatgacttgttcaaggtcatgtgacatggctaagtgagagagctggatcccaatagaaaacagtctttcaggctgcactgctttacatttttttctgactgaacttcgttaaatatgatttctttccaatttataatatggtctgtttaaacaaataaaactccagaatttctcagaccagtgggtggatgatatgttttggctgtgtccccacccaaatctcatcttgaattttatgatagctcccataatcttcccatgttgtgggagagacccagtgggagggttttcctgtgctgttctcatgatagtgaacaagtcttaggagatctgatggttttataaagggcagttcccctgcacatgttgtcttgcctgccaccatgtgagatgtgcctttgttccttccacttctgccatgattgtgaggcctccctagccatgtggaactatgagtccattaaacctcttttttaaaaagaaattacctggtcttgagtatttctttatagcagtatgaaaatggactaatgcagtggcactgggtcctccaggagtgagctgctctggaaagtattcaagtccttgccatttgttcttcgaaggccagctcagttcagtgtagttgcaggggtttacaggtctatctgtggactctgtccccaaagcttggatggtgttaaggagagtctctcagtacctgtgtgtaaagccattgttcagtgcttacccattctgctgtgtttctccaggccagagctctgggagtcacactggctcatctccagaacctgtatttttctctgtcagaaacattctctatatttgatgggctgagaaaaataatctattcaacctgagaaagctcattaaaaaaaaaaaatctgttgaataaaaggttaagttggtaagggaggctttggttttatacatacgggaataaaagtctcttacattgctaaaaaaccctttgtctttaaaagcatcaatcaatattaacagtgcttttaaagtgagattacattattttagaaagtaatcatgattcagaaaattaataaatgcttatgaatcatgcttatgtatttcattttaatctgtagtttggaataaagttatttcaaagagtgtttttggttattagaatgtttagctatgttatgatataacacttaaacttaatttcagtaacaacaaaacaagaacccataattttaggatctgtaatacagcctaggaaatgaggtctggtgggaatgcttccaatttagtatctttgtttttcagagaaggttatgaactctcttcaattaatccagatacagatagcttcgattactactgaatttatgtgaatgattatagtagactaatgagttaatctgttagcaacccattctgacctgtgatgtactaggccagttgctttatctgtatgagttagttttctcgcttcttttagtgagagtgataatttctgtttgttgcaagggtaagtctgttttaattatggcaatttttttctgaaatacttacttttaaaactttgtattatagaaaactccaaactcacataagtagagggggtagtataatggaccatcatgcacctgtcatcttgtatcagcaattatcagccatcacagaaagtgcatgggcgtccctgtgaaatggcagggctgtaagcgtggacaattgagagccatgctggagggaagcattgtgggtgcagcacacatcacgtcaggggcaatacctgggtgtccccagagggtatttcattgaatggccatattcttttcctaaatgatgggcatttcatttgttttctttttctttttttctttttactttttttttgagagggagtttcactcttgttgcccaggctggagtgcaatggcgtgatccggctcacagcaatctccgcctcccaggttcaagtgattctcctgcctcagcctcccgagtagctgggattacaggcatgcgccaccacacccagctaattttttatgtttttagtagagacggggtttcaccatgttggccaggctggtcttgaactcccgacctcagatggtgcacctgtctcagccttccaaagtgctgggattacaggtgtgagccaccacacctggcctcatttgttttcttttttttccctaacacaggcagtgtggcagtatttttctatgtaaatatttgcttacttctgttttctttgtaggaaaatggaggaaacatctagaaataaagaaggcttggatattttctttcttctctacaaatattttattgtgacttgataatttttagcactttggcttttttcttagttctaggttaattattctctaaatggaactgtctttatagggattatcttaagaaatgctagttgtcacagcacacagactcagaaatctctatggcttaacacaataaaagttaattttgctaaagtactacacggtttggcaagagtctcctccatctgttgactcaggaatccagtctccattagcttgtgtcaccacctggtgacagaggaacagggatctggagtcacctcactgactcttacacatcacctctgctcatgttcccattcagttcttgggaggctggcaggtaacacgaaggagcacatggatgctgggggagcactatgtctgcctcgctcctctggtcgtcagagtaggtgccattgtagatttgacagctcttgtccctgcagccctcacatagctaacaccacaccccattcacttgaagtcttctgtttaccagggaatcggaggtttgaaatcaagcttagactccacacgtgtctcagtaccttccttagtcgtggccgtggcagaacagcctctccaagtgcatcctggaaaaccggcatcagagcctttcagtaaatgggcttagtgtcatttaaattttaatggcaatattcttttttgttgttactttaaataaattccagtttttaaactttttaattttgaaataatttgtcatacaaaaaaagttgcaaaaataggatgcagatcacctttatacctttattcaactttccttaatggttgttttttttgtaactataatataatgatctaaaccaggaaattaacattgatacaacactaatccacagatcttctttgaattttgtcaaaggcaatactattataagtaaaggaaaagccgttctcaggttccagtttgcacatcccatcacctatgtgtggtctttctttggtcacggggaccccttactcaacaaatgagcaggatgcgctgagagtgcctactttgccgattaacaggtaacctagcactgggccttttgtagttcatgcattactatttttgcattactactctgttggcaacatgctgaaaaaaaacaaggggaaaggataatagcccttcttatttattagaaaatagacaaagaacctctagtaattttggagactttggagataaaaatggtctaaaactcagaccatcacttttctgcaatctttccatttctcttggccagagatagcacctctaaccttagctaattgggttgcccaaatgtgggcttggccaacaaaaggagcagaatgagggagtccagatcgctcagcagaaaataattctcaccactgccttaattcaagtcagcaagcacttattgtctattgagtgcttggaatcttagaaagaaatacagatatgtctattagtcatctatcactgtgtaacagattacctcaagcttagtggcttaaaacaataacatatagtatctcatgtagtttctgtgagccaggaattcaggagaggctttctgggcagttggcaggaggttcagttcttctccacgtgggcctccccataggcctgcttgacgtggcttatgacatggtgctgagtgagcagttcaaggtggaggctacagcgtccttcagggcctcgccttgcaaatcacacacacatttccacaatattctattggttacagaggtcagccttactcagtattagaggggagtacacagggcctgaataccaggaggcaaggatacttggggcacatcttggaggctggctaccacagtgggagagagaagtggcaaggctctgtgatactaaataggtttgcttgtgaagcattatttctgtctataaaaagtatttattaagcccctttctgtgtaggtatctgggggaagaacattctaggcagagggcataagagtctgagatgtgtgtgtgtgtgtgtgtgtgtgtgtgtgtgtgtgtgtttcccccacccctgtgtgttgttgttgttgtttttaaaagatttagctataggtctgaataccaagctatagctagtgtctcttctatttatacttaatttctttttttttttttgagacagagtctcgctctgtcgcccatgctggagtgcagtggcgccatctcggctcactgcaagctccgcctcccaggttcatgccattctcctgcctcagcctcatgatatttgtacttaatttctaataattaaatgtttgttatgctttatgtctttgccatagatattaatagatgaaaatgtggatgaactttgatgttcttttctgagatgaagtcattgtgctagccagtttcatttctcaatgtctgttaatggtttgtcattcgagtgcaaccccatgtaaacacacaggtaacttggttagtaagttgtaggaagaggaagatctctgactttactttttcctattctactggttaaacatgactgacatataaatgtttatctgtttcacagagtcagtctttattaacactccccatgttagcatcaaagaagaaagttttggtacaagcagccttacccacttatgtaggggtgggacactgattagcagttggtgtgactgtggtgcagagtgagccttgcacttagagaagcagccccctgatgccccaggcttgggtgtggcatctgacagctttggacaggtcacttacctctctgtagaaaggtggcacatttgtgcactctgtagaaagaatggcatctggcacattttaggaattgaaaatgaactttattatctgtagttctaagatatctaaatgaattcttaaaaaaaagaaaaagcgtaagcagagatctcaaatgtgcatggctgctttcttaagaagaatttatattttcaaaactaatactttttgtatactcctcaagaaagttttagaaaagtgaaacagacatcttttctttctgggacgtagtctgatggatgcaagcctgagtcaggtgctaacaaacttcgtcaaaagcagtgcccagcactggtttgcacctttggccctgttgctccccaccatgagtgcccaggctgacctgtggaaggggactctcccattctcctcgatttgcagactctttcctccctccctttatgaacagctacaagtacatgtgccctttccattatattcatgatgtttaatttctcttttgtcatatcaacttaagcttgaaattgagattacttaaccatatcttttaatgtcatgctcaggtttgtttaattttttaaatgttgtcttttatagagtttattatggttaatcaaaaaatatatttttttaagaatgagtttatattctttggagggacatggatgaagctggaaaccatcatcctcagcaaactaacataggaacagaaaaccagacactgcatgttctcactcataagtgggagttgaacaatgagaacacatggacacagagaggggaacttcacacactggggcctgtcagggagtggggggaaaagggagggagagcattaggacaaatacctaatgcatacggggcttaaaacctagatgacaggttgataggtacagcaaaccaccatagcacatgtatacctatgttagcaaacctgcacgttcagcacatgtatcccataactttaaaaaagaaagaaagaaagaaaaaaaatatttttttaccagctgggcatggtggctcacatctgtaatcccagcactttgggaggccgaagtggtggatcacttgaggtcagaagaggagtttgagaccagcctggccaacatggtgagaccctatctctactaaaaatacaaaaattagctatgcgtggtggtggaagcctataatcacagctactcgggagggtggaggttgcagtgagctgagattgcaccactgcactccagcctgggagccagagcgagactccgtctcaaaaaaaaagtattttttatttttattttttgagatagggtctcgttctgttgcccaggctggagtgtagtggtgtgatcatggcttactgcagcctcaacctcccagactcaagcaatcctcccatcctagcctcctgagtagctgggactataggtgcacacaagtacgcttggcaaatttttgtatttttttgtggagacagggttttgccatgttgccaaggctggtctcgaactcctgagctcaagtaatctgcctgccttggcctcccaaagtgctgggattacaggcatgagccaccgtgggtggcccaaaaaagaagcttttatttagcaaagcagaaactgaaagaaaaaggaagaaagaaaacaaaaaggctttttattacaaaaaaaattatttagtataaagagagtttaaaatagacatcctatcggctcattttagcaactttgagaaaattgtgaaatataaaatattaaataaatccaggggatatattttgactagataaaaattaaccctatataccataaacaaattcagaagaaaaaagttaggctaggaaaaaatatttgtaatattttaaattgaattttgtattgaggttactatatgtcacatgcaattgtaagaaataatacagtgagatgctgtgtacccctcacccggtttctcctaacatggaagcatcttgcagaaccacagataatatcccaaccaggatattgacagtgattttatctacccacctttaggctgaggttcattttctttgcttctatagatgtcttgttgatccagcactgtcttgcctccatttttatacctttgtcaaaaactagttagacttgtgtggtctgtttgtgggctctgttttgttcattcatctttgtgcctatccctctgccattatcactctatcttgatcactgtagcttcatagtaagccataatgttgggtacagtatttcctcccactttattctcctttgttagacatgtttttaagcagttctaggacctgtgcctttctgtataaattttagaaaaagctgtctgtgactacaaaaaatgatgctgggaatttgataggaattacattaaacctgtactcaatttgcagagatttaacttttttactgtgttgagtcttctagtcttttttttttttttttttgggacagagtcttgctctgtcgcccaggctagagtgcagtggtgcgatctcagctcactgcaagctctgcctcccaggttcatgccattctcctgcctcagcctcctgagtagctgggactacaggtgcccgccagcacgcctggctaattttttgtatttttagtagagacggggtttcaccgtgttagccaggatggttttgatctcctgacctcgtgatctgcccgccttggcctcccaaagtgctgggattagaggcgtgagccactgcacccagctgagtcttctagtctttaaacatggtattcctctccatttatgaaactttgtttaaacaaagtaataatatttggaatccataaagagcacctacaaatcaataaggaaaaaaaggctgaagagccataggaaacggagaaaaggctgataacaggtaatgtccagaagaaatataaatggacattaagatttgaaaagagaccaggcacagtggctcatgcctgtaatcccagcactttgggagactgaggcaggaggattgcttgaggtcaagagtttgagaccagcctgggcaacatagtgagaccctgtctctacaaaacatataaaaattagccaggcatggtggtacaagtctgtagtcctagctacttagaaggctgaggtgggaggatcgcttgaggccaggagttcaaggctacagtgagctatgattgcaccactgcggtccagcctgggtgacagagcgagaccccatttcttaaaaaaaagttgtgaaaagacgttcagttttcctgatgatccaggaaatgcaagttacaagctcccatgttttgccttgttagataggtaaaaattaaaaatcaataatactagcaatttttgttggccaggctggtctcgaacttctgacctcaagcgatctgcctgctacagccaggctggtcttgaactcctgacctcaagcgatctgcctgccacagcctcctaaagttctggaattacaggtgtgagccaccatgcccagctgggggtgggggggagagtatttttggaaagcagtcagcaaatgctgagtaaaatcagaaccagacctaacctgactgagcaattccacttctgcaagctgctccagaagcacatacacatgtgcagaagggtattggtagaaggatgctcaatacagcgttatccaaacaaccaaaatgctaatcagtagaggaaaggttacacaaagggtgtcttgtccatagtgtagaatactgtgcgccagttaaaaagaatgcagttgacctatatcctatgtgtactgacatttccaaagggataataggagagaagtcaaatattcccccctccttttttttttgttccactttccttttaaatagatataaaacagccatcttgtcagttctggccttcttgtcacattgttgaatggacacagctgcttcagataactcagttgtggctcaggaggtgaaattactgataaattaactttctttttatggctcttatcgcaaagtcatttatattgcttttgttgtgtagtgggaatggggaatgagggtccagggcctggagaggctggggttgtgactggggcaggaaccatgtgtctctggttatgcccagtggtcttatcctctcacttccctgcccctttggtatcctacccaggtcagaaggacagtgttaacctctctattaacaatggcttttcctttgaaaaggtcttaatagggctggcatccaagtttcatgggatgccctaatagggctggcaaccttgttttcatgatctagtttggtagaaaagtttcatagaaagtgtccatatagctgggtgtggtggctcacatctgtaatcccagcactttgggaggctgagatggaaggatcaatgagtccaggagttctaggctagcctgggcaacatggcgagactctgtatctataaaaaaaaaaaatatacaaagtttccatacaacaggttattaagtactttgatctatgttcttaccaaaatgtatggctcatttaatttaatagatcaaattacagtcacatgccacataatgatgtttggttaacaatgggatccatatatctatgcagtggttcatctatatatccacatgatgctggtcccataagattataatattgtttcttttctatgtttagatacacaaatacttaccattgtgttacagttgcctacagtattcagtagagtaacatgctgtattagttagttctcatgccactacgaagaaatacccaagactggttaatttataaaggaaagagatttaattgactcacagttatgcatggctacggaggcctcatgaaacttataattgtagaaaaggcacctcttcacagggcagcaggagagagaatgagtgccagcgggggaactgctagacatttataaaaccatcagatatcatgagaactcactcactatcatgagaacagcgtgggggaaagtgcccccatgattcagttacctcccactgggtccctcccatgacatgtagggattctggagattacaattcaagatgagattcgggtggggacacaaagccaaaccatatcacctactgtacaggtttgtagcctaggagcaataggctacaccacatagcttaggtgtgtagtgggctttatcatctaggtttgtgtaagtcacttggtgatgttcacaagacgatgaaatcacctaaccatgcatttcttggaatgtgtcccacagttaagtgatggatgactgtatttattttttcaacaatccttcagaacagaattgtttctgtgaacagagttcatgttgtgtatgtccttttcactctttttttccaaaaatttttactgtgcattcttatttaagacctataagaaggaataatacaatgaatgcctggtgtattcacctctgagcatgagaaagtgttcttcccactcatagagtcttctaggatgttctaatgatgaggggaccgactgccttcatgccccttgtgttcctgctttctgatggtattggcttctggggctcagctccatgctgtttcttgtaatgtcctcggtgatgggaaattctacagcaggattcaagattctgcggtgatgctgtcctgaatccatgagcagatctgtgtggtggtggccaggggtgatgggggctgatttggggaatggatttggctcaggaactcagttgaagctgtggacaccattttaagcactttgtatgttgacttcaaagttttggaagccttggaaaaattttaagcagagagatgacatggccagtttgcttttttaatctacggttctggcagaagtgtggggtgtgttgtgtgtgaggcaagggtgtgtggcccaggggctcctgctggtcagtttaggggccctgcaggccttacccttctcaggcatctagagctaggttagggtcactagttgcctcaaatcccatcttcccccacctcttccttaagggagacctgggtacacggggtgggtggggttcagggacttaataagccagtggtctctagtgtgggctgtcagaaaaaaaataataaaaagccacttggaggatggaaagtaaatattaccactcctatttatatgtatctcggaccattttataatgtttttagtgtgtgaataccacggaagacatagctaacttataagtagtgaacgggcattatgggaggagcatgctcccaatctttttatcagtagtgtgggccatcactgagtttggagactgctgctgagaggaaggtgggttcagttggggctgggggccagggggtcttggcagttgtgcccagtgtctgcttctgtgacaggctggcacttcattagaggcccaggcatctccaacagcagctctcagacagatgccagcagggcatctgcctagtgctccactggtggctggcctgcctcctgggatcagccccggctctggggaagctctcttcaggtatccccttgaggagtgccagccgtggagtcagacctgcctttccatcaggctcaggagcctggtggttctgccctggcagtttctctagtttgtgagttccaggaagagtgtgggttactcaacttagttacatattcttagtttgaatggtgtcctgagttacaactgacaagtggctctgaaacatctttggcatttaggaccaccattcctgaaaagtagcagtctttaggtttgatgaggtacccatcctttacagccttgtttgcaagggttacttagtcatctgaaatgtaaacaaaatacaagtcaatttttatagccttgtcaataatgctttacaaaagaatgtatgtggtctatagggtttattttttctctcgcatgttacacacaaatatttcttttttaagtttttattttgaaatattttagatttacagaaaagttgcaaaaatagaaatgttgctgagagtatagagagtacccatatacctcatccagctgcccccactgttacccccacaacatattgtcaaaattaagaaactgacattgggtacattactattaaacacatatttttggattgcaccagtttttccatttatatcctctttctgttccagaatctagtctaggatcctgtttcaggatctgccacattgcattttgttgtcagtgacagtttctcagcctttccttgtttttcaccaccttgacagtcttaaggaggactggccatgtactctatagaatatctgggtccaaggtttttctagtgatagactatggttctgggtttttgggatgagtaccaaaaagctgaagtactcttctcatatcgtgtcaaggggtatgtgacatccctggtgatgttaaccttgatcacctggttaatgtaatgttggccaggactctccattgtaaagctactatttttctcttttcctcctctgttctttgagagtgagtcactaagcacagtcctttcttaaaggggttgagaggattaagccccatctcctgaagttatctacatgcattatttatagtggcaggacacccagatagatttaattgcagataaacaagaaatttttttttagtgtgtgtcccttgcagtatctgaacttcacagttaattagacgtcctgtattttgttaaatctggcaaccctatttggaattcttctgtaagaaagatttgtctctttcccttgatgtttgattttgagtttgatttcactatcttcttggtatagctttcttcctactttctgtcatccttcagcagagtttgatatactttagtgattgtactttctctacttaattttttttaaagcaacatggaaaatagttttgtttgcttcaaaaaaggaatcagtttatgtgtgtgttttaatcaaaagatttttctcattatatgagccaaaaagcacattagtttccaacccctataaatgaaacccagagttgaagaaaacaagggatttgtaccgaatttctaagtgcagattgtgggaggggcagggaagaaggcgctgctcctggaagcagccccaggtgactaaagcagcagccagccaaacggttccatccagcctggcagtatgaggcacttgtgatttgcttatgacccatgacttccagcaggtgtgagagaattctaagtggatgtggaaaccaaggagggctacgtggtggggatgccaaagggatctgtgtagtttgcttttaaaaggaaacccgacctctcgtttcatgaagtgcacctagcccatcagatggcattgcatttcattaaagcagccattctgcaccacgattaccttgagtgttttgttctcagcagctggtacccatcaaattggggcctgcttttcatcagcagcaggtgttccaggaagcagccagggactgcagagttcaaagatggctcagctcatcctggagaggagaccactgttgtctaagcggccctgacgagcctttccagagctgaaagatcgctgatgggccaggcagagaggaggttttgggactcgggaaccaaatggggctgctctgctggcagttcccctcttatcagtttacttgaaagaaggatggcacatgagagggcgtgtgtcccttgaagggaaggtcccccctggcatacagcgggtgtttttttgaacatttgttgatccaatgaaggcatttcttccttgccctgccacacgttcaggtgactttcagcaactatgacatggatccgtctgccttatgaactgaccaccagcttctgtgttaatgagtccagtcacttgccgcttcttacctaaatctgtttgccaggtttccacagaaagccccccacctgagcgccctctcccttctccccacgcctctgcctctggggccaggtcatttctcttctatctctggcacctggcacattacttgacctgcagaaggccctcgtcagatgcatagggagtatctacctacctcaggtgggaatgacttgcgtatcccaaatgagaaatgcttatacgtgcgaaggtgcccagggcagtcgttaaactgtctgcacatgtgtatggctgatacatttagacagaggctgccagttctttttccaaaagaaaacaagatgcattgcttttaacatagcttcctgaaggtgttacaaatgtcagtatttggttcttgcagtactgttgaacagaacaacatatgtttgtccatgtgtttatatatttttaagataccagatgtctgtagtaccagttattatctatttttgatttatgttttgaaacttagaaacacattttgggctagtacgatagcatgagtgctgagtgctacctggttgtaggatatagttggacaagctattttgaattttgaattttcttgagtttctgtttatgggatgtcagtgtgttacacacatgataaacaggtcagttcctaacagctctaaaaaggagcaggcagttatgtttctgtgaggattttggcatgcaagtgtaatgctgaagaatggcagctgaatcctgccactgttaggggtgagagagccaggagccaagcagtgggacggtggcaccatttgaagacctctgttgtcggtgaagttagcttgacccacacctgtggcaaggccccatcctgagtgtgagagctcctggggccaccactgccagtggtcaggggatagagactgagcccccgagtcattactgtgaggtgttttcttctgcatctggagccacagtggcattgttgagtgaaatgagctaccaggttctcattttcacgcagctcatagtcctctctgaactgctcactgttctttcttgaggaaactaaatagcttaacttgcccttttccagatttttctgcctctcaacttctagagctgaatgtgaggtcatttaaaggttttcttttcagctttaatgctatagaattggacatttttgcagctgtggccaccttgctttcagaaatgtgtttcttcttattctggctaacgagcatctttgaggtgcaagtctcgcccagaacaggcatatctgagaggcgcagctcaccttgatggcttggctccatcctcaaaaggcagggagggcactttatagagcacttgtgttcaagcttccttagcaaggacccctttgtggacttgtaattatatctggactgtaataggaaacatcatgagctgctgtttgacatggggaccagggggtagtgaggtgagtaggagtgtgtgggaaggggcgtctctgaggccactcctgaggggcctttggccacacagtgtggaagccgtagctctggagtcagggtttgccagcagggtcccctcccactggtcaagggtctgcccttgatgctgcctgatgccctctccttgagagtcctgtcccttccctcaggtcagcgactacctccaggctgtggacctgcatgaaactgaaggccaggtatttccgcctgaaagttggcccgtctttgcattcctcggctgagctcctctttctcctgtcatgtgcaggattctgtcatcggatcaggctcttgggatctacccccttttccttggctttctgttcctcatctgtaaccagggcttgttcatccacatcttggtgataatgaaaacaacgagtgaccactgtcgactgagcgcttgctctgctgggcctgcccttagtgcctcactcacccctctccccagcctctaaaagttaggtgcagatgacccagattttccattttgtgtgtgtgtgactgctgaacttgaggccttatcactccaaactgggttattccaatcgctcccgggggggtctgcatgccaagggtttctgtactgtgtcttgcataccgtggcctgcttaacatttcttgaacgctttgatcacagcagttctctccacaagtctttgctggctccagttccattgggggtaaagatcaaacttcaggcgagccaggtctgtatctccattcctgtctctgactgcttccctgtagggattgtctgcaagcgcacacctgcattttcttgtccacaagtctatgctctaactctgtcacctgcatggctgcaaattagcttccttcttcctgccctcttctctctagcttggattttgaatttgaatggcaggcatgggatgtccgtgtgtgtgtactgctgatgtgtacagccgcttgttagcgctctcattgtcttcaaatgtaagtcattttggctgggtgcggtggctcatgcgtataatcccacgctttgggaggctgaggtgagctgatcatttgaggttaggagttcgagaccagcctggccaacatggcaaaactccatctctaccaaaaatacaaaaattagctgggtatggtagtgcacgcctgtaatcccagctacttggaatgctgaggcaggagaattgcctgaacccaggaggcggaggttgcggtgagccaagatcacgccactgcactccaacctgggtgacagagcaaggctgtgtctcaaaaacaagcaaacaaatgtaagtcatttccatttgacttctcaagagctcatctcttgttctgcaattaaattatcaacttcttaaggcaagaaccagaacttaaaactctgccacagctcccattgcagtgcacagagtaggcagtcaacaaatatttgcttttgattagagttctaaataaagtcgtttactcagaataaagaagctttgtgtcactggaatgagaacatggtgttgctgtttctcctgctcacatccaatcttgtcgttcttcattggttcatgagaggctaagagcaaatcaagccaatgaacagagaagccatggagtgaaaccttcagaggtttctgtacatccagacagtgaaaacattgtcatcatcatcagtatcacctattaacagaaaaacgtgagtctcaagtgctagtggcattcatagtgaattattttgtgtcatttcctttagtgtttgtcccatggacccactcggcagattcttgggtgtgctggccattcttgggtgtggttgtggatgacaacctcatggaaatggaactgagagatgccttgtcaatcctcagtcagtgctcttccaaacagtccccactgtgcacatgccctggaatctgcagtctgtggctctgttgcttagtagaatcaaggcaggtggatggagaaaggctgccacttcacatgacattctcatgtaaggggcctctttctcattctctagtatttattttatcttgagaccttggtctcattacagtttaaattttgttctcttactttaatggcttatttaattgagaacatttcaatgaaaaaatgtttaaaacattgtagttgtaaagagtctggggtcatgcggaggttttaattgatccctatgatgaatgaatataactccctagtgcagggcctccttttcattatttctcaaggcctttatcccgtctccatcagcacagaacagcttgatgttttttggccaattgcagtctgagttattccacttttaaagcattgacttcataaccgagaggctgaaggcagagtaagctggataagttactcctgtgctatttattgcataaagcattaaaaacagcactagcatggtcatctcttttacttttcagaggctctgtcatcactttaattggttgttgttagagcagatgttttaaaaggaatattttggcatgactatatttgcttaatttctgatgacttccaggacatgtatatctacatttacaaaaacaaaactgtggtctctgggagcagagcagcccccttggtcctcaccagacctgggcctggagagagaagtgaggttgctggggcaagaagtttgagggcaggaaacataaacttggaaagctggggccagtgtgcagaaacttctccatttacagtcaccagaacgttcaagagcaacccagatgtcaaaccaccttgaaatacagcttttaagaatgcaaaagctggctgggcgcagtagttcatacctgtaatcccagaactttgggaggccgaggtgggaggatcacttgagctcaggagttcaagaccagcctgggcaacatagggagaccccatctctacagaaagttaaaaaattagccaggtatggtggtgcatgcctgtggtctcagctactcaggaggctgaggtgggcagatcacttgagtccaggaggtcaaggctgcagtgagcagtgattgcactactgcactctagcccaagtgacaaagtgagaccctgtcacaaataaaagaatgtaaaagctaagtcatcattgttacaagacaaagaaaattaaaaaaaaaatcaacctgtttagagatagcttatgaaccaattaagtcctttgcaacctcagtacctttgtaaagcagttagctgactccagacttgggcatgatgcttgtttcacatgccatagctaaataaatctagtgagtttgaatagcttttttcagtttttttttttgaacttaggtattcaccaaaaagcttatcaatactaactttcaagaaaaaaagatttgtttccctgtttgggtcaaactatatttcccaaattggtattttataacagtttccaaaatgatatcctaactcagtattttgaagaattttagcttcagaaaaattctctaagaatgaaaggattattttatgggtcttacattcttttatactattcaagttatcttctctccccttttcagagtttggatagataggggaactccattggttaaacctaaagcagatacctaacaagtcaacatcctcattgtaagtggtcctgctgaattcagtagggtctagcaaacttcctttagttaattaatacattagctgatttggggctgtaccattatggttgtttgttatgataagccagacaggtgctgttcagttcataatttggcttcctagatgtagaagtctccggcttctgagccaaaaagcgagcgggccctgtcgtccagctgggttctgcttcattctatgcatggcgatactgagcacggtggtggctgggtacataacaagcgctcagtaactgtttatcgaattagtgaattgcagaaagagttaagtgaccagatgtcattcgtacttatggagtagcttattgatggagtgccatctggtttccacagtcttgttattatctgtaactgttaattgatagcctagctgtttaatctgtccagtatgttcaagtcccaagttgaaattttgaggttaattaatgttttttcctcatattttgtacccacctaaacaccttacagttaataaaatgtttaaccttttctggtatgaaaaattctacaagtcaaaacacatggtagaatatatctatgaatcatattttcttttgtgactgctactcctttttacaagttattgggagagggaatgggagggacttaattcttcccagattcctgctcttatataatgtaaagggaaaggcctagagtgatgaaaacttttcttgtcaagtttatgattcttgacctttttagaatggtgtctgtctcagttgattagaaaaataaaagtacagtttctttgaaatactgtaactcattatcttcaaaagcacttctactctttaaagcctgtttatgtctaaaatgacgttaaaaaaatacccttacaggagagggaaaatggtatttctagtttgggctccggggaacaaacacagaggtctttttaccagtcctcagagaggtagttgtgtggctgtgtgggcctagagtgtgtttcagccgagagtcccacaaaaccaccctggcaacgttgatctgattagttttctctataaattgtgtggtggcccactacataaaaatgattgtatccattttagagaaaaatgtttctctaaaaaaatgaaataaaaccctatgttagttttttttttttatttagaactaacaatttaaaaactttatcgtatttttctattttgttacaaaccatttcagaatcaccttttcttaaatgaccaaaccaaatttctcaggattaccttttttcctgtaattacttgctaaatttctgtatttccctgtggatttatatatcctactttggtgatttttttttccaatttactaacttgatttgatattaatatacagagaaactgttgcaagtgaaacattctgagcaataataattttattgacttggaagcctggctgtcttgatttccagtgtttgcctgcagtgtttaactgacaaccctgagattattaccaaacgtttatgattttttaaaaagcaggagaagaggtagagaggggaatggaaaaaatgctgtttaaattagaaactgcttgtagcagttccatagggaggcagttaacccaagtcacttaaaatatggtcacgatattgagagttaaataattttacttggagatgacttcaagaacaaatatcaaaaggtccaaatgaacttaaaggtacatcaaagggattgcagggcagcatgcatagtttcaagagttactttgtggagggtcgtttcttctgtgggtttacccccaatttggggccacatgtgacctcgtgactccagattgattcctagtgcctctgtggacaaggccagatgctatctcctctgggggagctgatgcccctcctctgctgccccagttagtgctcaccaagcagttttggaaatcagctggcctcccgtctgtcacaggggagccctagaccatggtgatggaaatctgcccctgcctctgcccctgggaccaccctgggcagaatagtgtgggtgcctgtgcagagacctttcagcctttgcctgcagttgtgctggtggagaccccagtcccagctcctgggaagtgaattctgtgtgtgtcacattggtctttaagtcaggccgtctctgttagttgtttagtgcagcatagcaggttactcccaaactcagcagctcaacacaacaataaacattttttacacagtttctgtgggtcaggaatttggaccattgagcccaggtgtttctggccaggggtgtctcatgagattccagccaagcttttggttggggcctcggtccactgtaatttggacaggcaggagcgcctacttccaaagtggcccactacagaggctgggaagctaatgctggctgtgggcaggaggcctcagtgttttgccacatgggcttttccacagggctgcttgaatgtcctcacaacatgtggactggtttcccccagagccctagccttggaagtcccatactgtcatttctgcagcatcctgttggttatgtaggtcagacctacctgactacatgggtcatgaataccaggaggcaagaatcactggggaccattttgaagtctggctgacacacagtggcaaacataccttccggttgctggatccatgttgttgtcatccctttgtatggctggagaggaacaagatgctcagggattttgggtgccattcttgagttatattctagggagctttcagaggtggctgcctgggcataatagaggaaagctgtatccttgccaaatgtctcggggaagcattttcttcaaactttgtactctttaaatcaatgatgatacttaatcttgtttttaaaaagaagaaaataagatcacctttaattctaaccttcacattaccaaaatggttttagtcttttttctatgtagtccttttttcctatggctacatatgtgtatatttacacacatatatatgtaaatatacctatgtgtatatttacacacatatatatgtgtaaatatacctatgtgtatatttacacacatatatgtaaatatacctatgtgtatatttacacatatatatgtaaatatacctatgtgtgtatttacgaaatgggatcacaacatactgatttataacctaagttttttattcctaatattgtgaatattggtatgtttttgcataccttgaaataatcttttctgacctcaattttgatggcagcctactattctgccataagacatatcatagtttatttagcgaaatcactgtttttggattttggagttatgctctagtttttcctcttaggagcagtgatttggtgaactgtactgtgtactgaatcttgccatgtagcccaggttgatgcttgctgtaagttcccagacctgtaatgctggggtagagaatgcagacatgtccaaggtttcgaaactgctcatcaagagctcctctgtgatgtttgtatgttgtacccttaactggcagagtttgcaggtgccccttccccaccttggagtcagcacatcattgtgaatgtttgccaatttggtagaataaaaaaaatgaggtgatagagcaactttgtttatgtggagtttgccttgtttttttaaaaaagtcagctattcctaattgtctaaagaaattaggtcgggggtgggtggggagtagcatgtgcagattgaattgcaactgccaggcaactcaagtggaaacccaagcagcctcccctgtgagaagctgttttctccaccccgtggtgtagccaataaattggaaaattgacggttgtatgtttgaaccttcatttgtctctacccacccaaaatctcaaggttctgctgagcagcaaaacagacaagagtagagtgcacacacaactgatttatcttcagagccttgaagaccagagatgtcctgactgtcttcaccgacggctgctgcttgtaggatcacattttggtcctatctgttctcagctctgccgctggttaacttacggctcagtgacaagcagacttttggatcccagtctggtgtttcacacttgtgcatgcgctggagtaattctcgttcgcccttgagtaattccatatcaagccccccaaaagggcaggaaagggaaggagaaaggaactcacatttaccagctcctagctcctacttgccgtgcgtttctcttgtttttattcttactgcctcccaccccctaaaaagaaaagaaacaggtatttcctatacattattcaggtgacaaagtaattaatcatttataaataacatacagctgaataccttctcttgtgaactttatgagcaagtaaatattttcttatttgacgcttttgtttcctctgcttgaatgcaagagctttacaacccttaacagcccaagtgcatttgaaatggtttgagttttcactgtgttgtttctacagaccgaaagaaaacatgcacaagtttttccattgagtagataacatgtcacttttttttttttaatggactggagctgtgactgttcaacttgttgctgaagaatccgtgttctcttgtgcagctctgagttatgtagggaacagttcgttgatgagatgctcctagtttatgttgctgaatttttttcttcctcccagagctgttttctcttatttaagaacacttgacacagagaactggggaggggtgatcaaaactggctaacatgcctctaatgcccatcctgtgctgagcagaacgctttgctctgatgttggacgtggtggaaatctgctcccagggaatgcttttcataagccatgggtgttcaacaaacactgattaatgcagatgtttactttccagagtgtctagaaccttccaccgatacagttttattaaattccccccacacctgaaaggagaactgtttcagtttactgatgcagaggacacaggacagagaggccgggtcagataagaactaggtcccgaattccctcttatttttctctctttacaaacttctatccaaatacaactgcaaagacaaagttcgggactatctacacaatcttaagcagtaatttgagaaatggagttgcttctttttaaaaattaaacctcagctctccttagtggatacacaagtgtgatcttaaacatgcttggtgagaggaaagagaagagctcacttctacaacactgcacaccttgattctttggtttcttgcgggataaattagaaatgcaggtttcactgagatttttgagacaatagaatattgcccaatttagttggaacataaaagaaaggcttagaagagaatttgaaaccaagaggttcactaaatgccagcagggtcaggtaggtcagcaaataagagaaattagtgaaactgcttgtgtactggagcgacctgatgtagatagcctcaggttgatcagcaccttgagagcacctggggccatggggccacctcgcagccctctgtctgcaggtgcaccagctcagccccttaggtgagaggaaatagagctgattttatgaggcctctgggtgaggggtggactgttaacacctccactggtaattcaactttactgtccagaaattgttcttcatatgagcttgcatctttctaggttagcccactgcctactttaaccccacatctcactggacatgtagtatctcttgagttctgatacttgtcattttctggaaactcgtaatataatattttgaaactcgattgcaggtgagaccatattgtaactgtgatctattctaaaataaaagatctgaaaacatatcagaaatacacttttaggattataaaatggacattagctaaatgttcaatgttgaaatgaagttcaggtgagctgtttaccctctgggaaggcaacattttacctttttggttccgcatttgttttctctctctacttccccattcctcttcctcccctcgtcaccgcccttcctcttcccttcctcctgcattgccagcactacttttttttctcccctcccctgctcaccccacatctatcacattccttgatagagagttgattttcttctcagtatgtcgtaggcttagaatcagtagaccctgccggacacaggccttctcctcactcttctgggccttggctttctaggagagctcttttctccatgttgtctggtcatccattagatggcttattaggagtggaagaaaaagctagtgagaccctgggcttatgtcagcagctgttttttgacatttctatagtattcagagttaaacccggagtgagccacacccttaaccaggtccatgagtgagccagcaacttatttctggttttctcaagaccatccttttgagttgtgaaagtgtttcttgatttacattttctttgattgcatctgaaaaggcctgttggcctgacaaccgttgctatgggaataatactcgtggttagtgctgttggcagtcaccattatcaaaaggatcaggtgcctatttatttattcatggtgtggaacaaggttccctcataaagcgcatgaaccttgttctctcccaccttattatagtctgaggtttacatgacgtgcatccaaactgtagtagtgattttaatttgccactagtgtctttaattttctaaggagtctgggaacttgagatacattttttggagaacagatattaaaagtgagatttcaaataattaccctttctggtatgatttatatgtaacactgatctgcctgattgtcagggggaagaataaactgctgttgagaactgacctaatcaaactggccatattcaactcctagattctttttggtaggtaattatcactgctagatgtttgaggtgggtgagggctggttattccctcactgccagatgtgatggaaataagtaaccaaattctgttctacaaggtttattaaagagacatgaattaataagtaagccctaaatatttcctgcaacctgttctgttagcttgctgaagcctccttgctcaggagagatgccacatcttctagatataggagcaggagctgttatctcttacttattgatacacagtcaaaacaaaagtctctctatggtggttcctggggatgcagtaacagctggaagacttttatggttcataaaattgggtctccattaggccctcagaagtctctgatccaggatcagtatatgtatcattgctcaggaattaaactttggacaccttccttaggtgttgtagagactatagacctaggtagatttatataccttgtttatgctggggaggggagtgtgcttcaaatatcatagccaatctacatttcacatataccattaatttcactggtgagaactcatttctaacacccattttgcagattatcaaatcactaattttattcacggtctcattgtgtcacctaggctgtagtgcagtggcacaatcatgggtcactacatcctcgacctctcaggctcaagtaatcctccccactcagcctcctgagtaactgggactaaaggtgtgtgccaccatgactggctaacttttttttttttttttaattttgtagagacactctttatcacagtgatttttgttgttgtctacgtttttttttttttttggtctcactatgttgcctggactggtcttgaactcctggggtcaagtgatcctcgcatctgggcctcccaatgtgttgggattacaggtgtgagccactgtgcctggattgaacacctactctgaccttcattttgtcatagtatagctccatgccatggtctgggtaactgaagcatctggtatcgctgcctctggagtgtggctcctgattccaatgtggggtgctcactcctgtggtgtgcaggccaaggcctccgtgtctctactgtagggagatagcaaagcaaccacacagctattttcttactgtggtctgagacaaggtgaccttgaacaggcctcacttcaggaggttaaaagtacaaaataaagccagctcagagtagatgacgggttaaactttggtggtgtcatcttaaaatggttccctgaatgagtgagtttatctgtatcacaaggacaattttatgaaccataaaagtcttccagctgttactgcgtccccaggaaccaccatagagagacttttgttttgactgtgtatcaataagtaatttggttcagaatagtttttcgccagtccttttctataagtcaacaaataaccacttgcaagaaataagtgttctctgctctttatcccagtgatttgttgttgttgtgtgtttctacgccgggtgagtggtttggagctttttatctgagttagccagggttaggtggtcctgagtactgagccacacaccctcatgcaggagactcctgactggggatgggaagctgtcatctcagggttcagatgccagctgggcacgctgagctgtctgtccatttgggacactttataagcaactggattcatttacaatctggtttgcaggcaaggcgtgcaattattttaagcattataatgtgaaaatcagatgaagccccacagacactttttatggcaagatgtcatccgcttgagccatcattaatttgtctggattgcacatatcattcaggtttatcccattggaaattctatgggatccaccaagtgttttttggaggaaggtgttttactgggaagtttttcaatatgaaaatgaaacatcattgtctggagaagaacaaggacaggaattagaatgggctttttgtcagaaagcatgtaagcaggaagagagtagaagaaaatgtttccagtgttgagagaaaaaggctgccaatttagaactctaaatccagggaagttatcctttagaaatgaaacaaaaacacacttcctcagacaaaccaaaactgaggggatccatagctggtagacctgtccggcaagaaatgttaaaagaagttcttctggtagaaggaaaataatattatcagtaggttagaaatttggatctacatatagaacagaagagcgtcagggaaagataaatgaaagtaaaataaattcttttatttttcttattcttacttgactcaaaagttaacgatttaaaccaatcatagtgatgatgtcctggcgattgtggcatatggataagggagatgagtggcagcggtgccactagccatgggagggaggaactgggagtgctgttctatggtacctgcccacaggcgttaacagtacagtgttatttgaaggtgggcttagatgagttacaagtgtgtattgtaagctctgggcaatcactgtggattttaaaaagaagtataattgatctactgagagggggaacccgtatttgtgaaggtgtataaccagcccctcatatgctcatctcctcccattttaggcaacagacatttcaattacctctttcaattccatcaggccactactctgagggtgatatatacgtgatgtgtgaccatgtgatgagagatttcttcgcccattgttggacattgtgctgtaaactgtgttccttgctttgaagaaatgtaacatgctctcccagatgggcacagtatctattgttttaatccactaatagtgtcttgagcattaccatatcccacccagtatgcaaaacccagtccagagtaaatgtatgttcctgttaggacccatgtgtggcctcctgagtgtagaagcagtggtcccatgttgtctgttgtccttggcagctgtgtgtggaaccttcctcccttagctgtctgtagtctctttcttgctggtagacaggacaatccttgacattttgtgccttagagcatacaagaggaaaatgttgacagtcaactcatctctaccttgccatagctcccttgtctatttattttttggacacagatggctggcccaagcgagcacacccaatatccactagttggtttcagttaccttctgtcctggaagaaggttcttatgggcatcaacatgtctgtttagctccttaaattaccatagtggttttcataggttcatgccccatgtgggtataccctcaatagccctgtgttctgtctgaccatgtggcaagccatggctactgcccatgaatatgtatatgctcaaacttcaggactcatattgttgcctatatttttttcattatgaggaaaacagtttacagattaggacactgagctgatttactcttaaccttctttaatcagagttttcctattagtcggttgtggtgtaatggacttccaaacagaatgctgcccatctatcttggagtgccatttgtaaaccaggcagctttttgttggtcagttgtgagttggtcatagggcactgcgcatatgacagtagggtctggcagcttttcaggtggttccaaagttggccctaggtgaaaatagactacctgttcatggatacagtgagtagctccttgagttcctctgttagcatatttctgcgtgaccatttccattttattatgtgactcttctgggaactgcctttcttattagagtgtttctctgtcaatattgtctaagacattatgggtatttcagatttcaagattattttatgtctttcagtcattggggcaattttccttagtacccaacagcaagccaatagtcatttctcgagtggcatataccataccactatgtttagaaatgttcaggtctgagattccagtgcttgctgctggctggtagtcatgagctgtgccctaagcttcagtctgtgtaagtgcaggttgaagacacttccaaagtcctatctgagtgtggatcatagggcccaacaggctttgactgagccactgctttttgcaattcaaagatagcctgatgcagtttatgctcccattcaactgtgaccttctttgggggtagttttatggttaggaactagcagtattcccagaggtgggatacgcatgctccagaattcgagcaagctgactgggcgccgtgcttcttgcttgattccaaggacaggcaatggcagcaggttcctgctccctttctgcctgcagcctttccagcctatttcctcaaagccctgacctcttgtaactatggtttttttccccctctacttagataggtatcctggaggggataagagtaggagcaattcctttttcaaagctcagatgaggctctgcaaagcctggagagtaggcctttccctggaaagtgggcctttgttatggagatgtggctatgtgtatttctcaagggttgctcttctctcctactggagccacatgagggtcttctcagcaattcactgtgagaatctggtccagttcctgtctggaaagatccaccaaagtatgtggatctccccactcctgcctccccaccccacccctgcatgatgggctcccaggagtttctcactttcacactagttcatgctcacctccagcagttcaccaaatgacttttttttttcttgagatggagtctcaccctgtcacccacactggattgcagtggggtgatctcagttcactgcaacctcagcctcctgggttcaagcgattctcgtgcctcagcctcttgagtagctgggattataggtgtatgccatcatacccagctaatttttatatttttagaagagatggggtttcatcgtgttggctaggctggtcttgaactcctgacctcaagttttccaccagcgtaggcctcccaaagtgctgggattacaggtgtgagcccccacacctagccccaaattaccatttagatgttcttttcagtttatggctccagaagcttctgccacagctaagcagatctcaactgccactctggatttgcttgtctctccagatttcaaggtggtgatttgtcctatgatcttagtttattgatgggttcaagaaaagtctttaattttcagtttgtccagccttttcttgttataagaatgacagtgacaactcccaaaatctctacatgttggagctaaagtcggaagtttctcaaatcctgttgtaagtgactgtgcctgagggctcagccccactaaggcacagttttgtttttttgctttttttttttttaattagagataaggtttcactgttacccaagctggagtgcaatgatcatagttcactgtaaactcaaactgggctgaagcagtcctcccacctcagcttcctgagtagctgggcctataggtgcataccaccatgccctggcatatttaaaaaatttcttttgaagaaacggggtctcactgtattgcccaggccagtcccaaactgctagcctcaagccatcctcccaattactgagtttacaaatgtgagccattgcacccagccacaaacagttttgataagaggcttctggaaggaaagaggaaggctagaaggctccagagatcagctcacaagacacagccaaccctttagagtatgttgaaggaaatatgtggcaagggataaaggtgctggaaggagagagaatccaccccaggcatgtataaaaccagacctgttttcctccttatacatagctgccagttggctgcacatgacgggtgtatgtgagagtgctttctgccttggacctgtggccatgggtggctgtgtgaatgtgcaggggggcagaggcgccaggaagggagaaggtatggcagacatccttggggaggcaggagtgactgagccctgcgcctcgctccagcttcagtggctccatggcagacacgtgggtgaccgagtctctctctcatatgtgcatttggattttgttgttgctgcatactcaactctggcttagtacagattcctagggctaaaaaccaaatcagcacatttcatactctgtggtttgttttagctctcttttctcaaagctaaatacctaagtaggaacttgtgctttgatgtgacatcccaaatgtaccttctttgatgcagcccagagtgtgttgtagtcacactgaacaatgggaataggagaagggagaaagccaggcagataagttcccctcttccttctcccctgcagtgtacaccaagtcatggtttttctttttgcttgcccagagaaagtcctgtgtgctgcgccaacttcagtgtcatttgtaggcccatcgtaaagtgggagcctgtagggcctttgcatcatgtcccagtccttcttacttcccttcccagtggcctcacttttgtcgccctggttctgcacctgctaaagaaagtgtcagcctcaggttctgtttcctggaggatccagactgagacacacatttacagaaatcaatgacatatgatgtatttctcctacgttgagatatagaatatccaccatagtttgtgtcctctttttatttaaacagattttataaacattttccccatttgaaatattcttctctagcatgattataaatggctgcagagttttccataatgtgaatgtatcagcttttaaaaaccaatctcctattgttggatatttaggcagtgtgtgcccttgcacatctatttttgcatatatacctttggtaatttctgcaggataaattcctagaagtggaattccagttatattgttttatatatagttatatatggccagttagccttccaaaaagtttataatttaccttcccagcagcaaagtataagagtacttgttttcttggattcttcccaatattgtatatgctttaaaaatccatgtcaatttagtaggtgataagtgatccagctggaatttacatgtcatttcttatatgtgaggttgaaccttttaaacatatatttattagctgtgtgtgtgtgtgtgtgtgtgtgtgtgtggtgtgtgtgtgcatgtgcatttgtgaattgcctgttcctgtcctttgctggtttttatcttttcaatggaggtgttctttttcttattgatgtgtgtgttctctgttgtccaccgtgttcttccttgtagcagaccatggctatggccctactcaaagaccaggttagagcagaaagtcttggggaagagattttatgagaagttgcaccaccacaatgcagactcactcaggccttccacaaatatttatttagcactgactttgtgccaggcactgtctagacacttgggatttagcagtgaacatagaaagatacatacagagcttagattctggtctattgggggttgtatggagctatgggaaatggtgcaaaagcagacaggtgtgccaggtggtgatgaaggtgatggagaaaattcaggcagaggagaaggatggggcttcctagtgggctgcatttttagggaaccatttgagtcaagacctatgccagggggcaatcatgcagaggtctaaggaaggacatcctaggtagagggaacttccaggttgggtcccagagagggccagtgctgggtgagtttgaggaactatgacagcacacagggtgtgagggtggcagtgttggtggagggaggtgagggggtgtcaggaccagggacacagggcctcaaatctgagcagctttacaaatagcaagttaagagggattagaacttgtacaggagtgtagtttgctgaagtgccttctgataaaggagaaatctcttccacagtggtagcccaggttagacttagtgaactgtaggaagtaaaaggaggtatttatagtgtattatgtttgtaaaacataaataaagggttttctttttttttctttttctctttttttattgagataaggtttctgtcacccaggctggagtacaatggcataagcatggctcactgcagccttaatctcctgtgctcaagtaatcctcctacctcggcctctggagtagctgggactataggcatgcccaactaattttttattttttggagagacggggtctcactatgttgccaaggctggtcttgaacttctgagctcaaatgattctctcaccttagcctcccacaagccactgtgcctagccaaaataggattttgaaggatggggtgcacagtctttggacagtaacagtaacaaagaagacagttttgtagaattggagaaaatgtgtttgcagaaggctgtttggacttgtgccttcttaatctttaagcaaggtatcatcgcatcccacttcagaggtggttgttagttgattctcccttcaccattcatcaaaagaacagtctgatgccagcggctagtttcaaagagtaaaacggaatatctctttatttcttttaattaataaaacccatgcatggtccatctatatttgaagctaaagttatgtcagtataagaacatagttccttggttctcagaagatgtttattcattcactaatcaattttttcacctatcaaatattatcatttacctactatgccacgcactaggcatttgggataccatgatgaacaaaactgacacagaccctctcctcactgagtcttcggacttgggatcaggcagacatttttgaaataattctacaaataagtattaattataacctgtgataagtgccatgaaatgtaagtacaaagtgtcagaggagtgtgaacctagattcatgcagggtacaggaactcttccctgaggaagagaagctgagctaaggaaaagggtgtaatgaggtgaagtgggatgggaagagcactccagggagaaggagcagcacatgcaacagtcctgagacagggtgaccctgcggctttcctacataatgtcagcggactacagcgtaacactttgggggcataaactattaccttttggatatctggaaggtcccttgccgggaacgacccatctttctatactagattgccaagtgttatttttgttgtctgctctcattttatcttctagtgtttggttttttagctatgaagcattcacagaaatgataagagccaagatctccttccaggaatgtggtgtttaattgggtaacccgtgtacctgggagaaaatgcccgcagaatattgagtaggaagcaggaagtccttgctctgatcctcattccctggggtggcctgtggggggtggggaggtatgtgttagcaggtggagctagcagtggccaggaaggcatgacccaatgagaaataaaaaattcagaaccctctgaaagcattgcagaatatgatgggaattgaaattagaaacattgtgtgcatttctaatactcgtgctaggaaaaagactatagctgtgttaaagtttaatgcgtggaccgtaatagagagctgaacagctctccacggccccgtttttccattcgttttcggaataaagaagctggttctattttaggcttgtatttgggaagtggactttaccagaatgggagtctgaggccagagttgccttttccctcccatgtgaacagatacagttgagaggtgaagaatggtgtgctctgccctccactgcccgccccctttgtatgtgtgttatgtgaaattttaagggggtatatggagtttggtgatttaaaattctttatcagttttctctctagattttcatagaatcacctatagactttctttagggtacctctgttagggacagaaaaagggaatgaaatatacaccggtttcttgttgttttcatttttagcattcatttgagcagggatgcaactgaggctttagtttgcccttggattagttatcctctgtctcagtaggcaggtttatttggacagtggcatatggagagggtcaatgggggcaggaaggatgttggtattttatcactaacattgtttaaaattacagtgcatgtggacaataaaaaccataatgactttattatttgttttaaaactatctagaccagcactgtccaatagaattttttgcagtgttgcaaatattttacatctcactgtccagtacattggacactagccacttgtgactaatgagcactctaaatgcagttagactgtggaacttaaattttaattaaaaattttttcataagtttaaatttaagccgggtatggtggcccatgcctgtagtcagtcctaactacttgggaggctggggcaggaggattacttgaggccaagagttaaagaccagcctggggcaacttagcgagaccttgtctctacgaaaaacaaaaataagccaggcgtggtggtgtgtgtctgtactcccagctacttaggaggctgaggtgggaggatcacttgagcccaggagttcaagactgcaatgagctgtgatcacaccactgcatttcagcctgggtgacagagcaagaccctgtctctaaaaaaaaaaaaaaaaaattaaaaaataattttacccatgtaaaaaattgaattatttgtttttgtcttgttgattttttaaaaatttcttgtagattttggattttagacctttgtcagatgcatagtttccaaatattttctcccattctataggttatctgtttactctatggataatttctttcactgtgcagaagctctttagtttaattaggttccacttgttaatttttgtttttgctgcaattgcatttggggacctagccaaattctctagcaaagcttatgccaagagggtatttcctaggtttttctttcagtatttttatagttcgaggtcttacatttaaatcttaatccatcttgagttaatttttgcatatggtgaaaggtaggggtccagtttcattcttctacatatagcgagtcagttatcccagcatcctttattaaatagggagtgctttccccattgcttatttttgtcacctttgttgaagatcagatggttgtaggtgtgcagccttatttgtgggttctgtattctgttacattagtctgtgtgtctgcttttgtaccagtatcatgctgttttggttactgtagccttatactatagtttaatgtcaggtaatgtgatgcctctggctttgttctttttgcttaggattgctttggctacttgggctcttttttggtttcctataaattttaggatagttttttctgtttttatgaaaaatgacattggtattttgatagaaatggcattgaatctataaattgctttgggcagaattttaacatgggcaaaggacatgaacagacactgctcaaaagaagtcatatgcatggccaacaaacgtggaaaaatgcttgttgtcactaatcatcagataaatgcaaatcaaaaccacaatgagataccatctcacatcagtctaaatggcaatttttaaaattaaaaatgagcagaagctggcaaagctgtagagaaaagaaaatgcttataccttatttgtgggaatgtaaattagtacagccactgtggaaagcagtttggagatttctcaaagaacttagaactattaatatcattcaacccagcaatcccattactaagtatgtacatacctaagtgaaaatagattgttctaccaaaaagacacatgtacttatatgttcatcacagtgctattcattctagcaaagacatgaaataatctaagtgcccatcagcagtggacacataaagaaaatatggtacatataccccatggaatgctctgtagccataaaaagaacaaaatcatgtcctttgcagcaacatggatgcagctggaggccattatcctaagtgaattaatgcaggagtggaaaaccaaatactgcttctcactaagaagtgggagctaaacactgagtacacatggaagtaaagatgggaacagcagacactggagactactagagcgggaaaggagggaaggggatgtgggctgaaaaactacctattgggtactatgctcatgacctgggtgatgagatcatctgtaccataaacctcagcatcacacaatatacccaggtaacaaacctacacatgtaccctctgaatcaaaaataaaattaagaaaagaaaaatttaaatagccacacctggctagtggctaccatattggacagtgcagggctagacaatgtcccaccttgttgcctgcatctggggtgcatgcattactcctactccccagccttagcccctactgcttggagaatctcacacctggtcagcataaagccagttttcaggctgccacttacttaccttttggtgtctgtgccatgaaaagaggcagagaccaaagaggttgtgcctatgtaaaaggaaaaaaaaattagcaccttacttacaacttagggcacaataaagcatgtatctaagaacatacttttattgtctactgattaccaatgatgtgagagccacaccccaaactgtgttctcctccatagtttattcttcactttagtgtacacactggccaatgcaaggacttaatgatctccatctttcatgtgtaattaaatattaacatgatacctaagacaaggagtttgacgtttgctgatttgatgccttgtttgtaagtgatggaggtaatgaaatggtttctaacttcttagagaaaagtctctggaacgtagcatctccattcatatttgccacaagctctctgtatctctgcttcctttggctatttgccagggggaatgccttttatctgcaggtttggggcaggctagggggagaagaggtcattttactctgcctttatgacaaggttaactggtttcatcaggctagtacaagccaccatgaatggatccactcactgagggaagaagacaaatgcctgctagctatggcactgattgagttgttgctgaggtcagtagctcaaagggatgcactaaaggcagagccatctgggctggagtcaggaggagccccactgactgcctggaaggagagctgaggctctgaaccttggctcctagcacttggcaccatacgcctataaattatgtttactttttatgaaatcatccctgaaaaatctttctgccaaacaggatagagctgcatgtgaattaatcagcactcttattaaaatacatcagttatcttttattttgctatatgctacttgtacatcatttggacattttctagaaacaggacatggatttttttttttttttttttttgagacagagtcttgctctgtctcccaggctggagtgcagtggcacaatctcagctcactcactccacctcctgggttcaagcgattctcctgcctcagcctcccgagtagctgggattacaggcgcgtgtcaccacgcctggctaatttttttgtctttttagtagagatggggtttcaccatgtgggcaaggctggtctccaactcctgacctccagtgatccacccgcctcggcttcccaaaatgctgggattacaggcgtaagccactgcacccggccaacaaaattatcctttgcttttctttttgaccttgtatttctctttattgtggtggttggtggtggatgggaagggagggaacatttgtttatatgacttttatgtaaatgaagagaagttagtcagtgaataacattgtttgttgttttctgccagcttttcttgtaatagaaaaattgagggccaggtgcggtggctcatgcctgtaatcccagcactttgggaggctgaggcgggtagatcacctgaggtcaggaattcgaggccaacctgaccaacgtggcaaaaccccatctctactaaaactacaaaaattagctgggtttggtggcacatgcctgtaatcccagctactcgggaggttgagacatgagaatcgcttgaacccaggaggcggaggttgcagctagccaaggttgcgccattgcactgcagcctgggtgacagagcgagactcccatctaaaaaaaaaaaaaaaaattgtcttccgcatggatcacacttatttattagacatttatttgttttctccctttgctccttaaccaagcaccttgaaagcagcacccttatccccattgtgtatccagtctcagtgaggtattcacagagtgggcacatgcagggaccacaagcccatcagtaaacgagcaggacgttagaaattaggagttagatctgtgctgaccaacatgctagcaccagccacgtgtagccatgaaaattaaattaataaaaaattttccttagctgcactagccacgtttcaagtgctcagtagccttgtgtgtctagtgactactgtattgcacagcacggatgcaggaagtctccatcgcattgaaggttctacctgacagcaccatggtcgacctttctggaatgagcttgtttagtctgcagatgttgctgagtatcttctcagaccctgctctgaccacagggatgctgtgaggagcaacaaaggccaggcctggcactcacagagacaccatctgggtgaggaacaaggtgtgagaagtgaacgaaattcttacatcataaatgtcagtaccgcagtgctcacggctccctggggatacaggagtaagatcctattccctcttctcagcagggaagagagataattaagcatcatattttacaaatggggagacagattagtgcaggtaaattgagcccacccgtgccttgcagttggtccctttgcctctctgagctgcatcttcttaccctggttagtgaggcgtttagaacgtgttctccagagcattggtgagggctccaaagaaaaccttctgcttagcactcaccatttaatacattgaggctattattacggtaacctttcatactataaaactggttcggaagctaataagcaacctcagctagaggccgcgggaaggggaggcctttactgggaaagggaacaactgggttagggagcagcagccgggccttccgaaatgattgcatttccctgagggggacatgcctcggtgagattcttgtaaatggaacactttgcagactcctacttttttttatatacaggtcacaaattgcatttatttgtagacatctagaaaacaatcaaaagtgtgtatatcactctatatagatcttattaataattttatttggacaagagaacttatgccacagcagtcttacacagcatggttaaagactgcagtacccccaagagtggtttcaggtatgtacagtatgtgaagaaaaagtggcacctcagagccaccatgatcaagttaaaaacgcccgacgtatagtatatgtgccaatagattcccttcaggtcatgaccagcatgaaaaacatcaggacacagatactcagcgcgtgttctgcgaatgtgtcctgcagtatcttgcagttaagagttcagatcagatcctgcttccatgttagcatcaagccctcaggagaaatgaaaaaatcccttttcccttgtgcaagtgtcagcaacgattcacacatagagctggagtgggctgggtagctggccgcagaacccaaccagtccttgcctgggagaaaatgagattgatactgaaggtctctcgttcaggtgcacatctgcctctggttgtaagaatttcgtttattggttggtaaataaaaccaggagaaagcaatgcaggtctctgggaatctcatcccttccataagggaaatgctctgcctatgccagccccctccccctccgcctcccccttccccttcttccccttccccttctttcccttccccttctttcccttcccttcccttcctttcctttcccttcccttcccttcccttcctttcccttcccttcctttcccttcccttcccttcccttctcttcccctccattcccctcccctcccctcccctcccctcccctccccccttcccttctttccttctctctctctctctccttctgccctccctccctttttctgtttcttcctccctttccttttcctctgacagggtcttgttctgttgtccaggctggagtgcaatggtgcagtcatagctcacttcagcctcaacccccaaggctcaagtgatcttcctgcctcagcctcccaagttgttgggactacaggcgcgtgccactacacaggctaatttatttttaattttatttttgtagagatggggttctcactatgttgcccaagctggccatggattcctgggctcaagaaattcacctgcctcagcccctcaaagcgctgggattataggcgtgagccactgtgcctggcccacgttttattcagtcaggaagataggaggatttaaggctttggtgacaattataatagtcttgagaaattgttttcccttaaagtcaaggtgttttgtagactcctatttgaccatattttaatggatgctgttgtcatatctgcacccaggctgcgttgtcttctgtaaagagcacatctctgctccagaatcttccctagaattttccaggagcgaggggaatgtgggcctcatatgtcaccttcctgcctgtgcgtattcccccacctctcagacactaatgtctttgagcaagtcaggccgcctgtctcggagtctcattgtaggtgaaaatggggacgtgcagggccttgccaagaccaggaaagatgacatctgtagtttccacgtctttctcggtctcaggtggtttggttaccccagcccttcaggtcaggtgccctcctagactgggggtcctgcggtcatgatggatgctcagattagggaggaaattcatgggcgtgactgacacactgagtcagcagagtctagaaaaggtcactatgctcacaggtgaactgtagtttttgtttgtttgtttttgtttttgagacaaagtttttctcttgttgcccaggctggaatgcaatggcacgatctcggctcattgcaacctccgcctcccgggttcaagtgattctccttcctcagcctcccaagtagctgggattacaggcatgcaccaccacacccagctaatcttgtagttttagtagagatggggtttctccatgttggtcaggctggtcttgaactcccgacctcaggtgatacgcccacctcggcctcccaaagtgctgggattacaggcgtgagccactgcccctggcctgaactgtagtttttactgcttccatttaaaatctgagaaactggagaaaaatcttgtactcaagattgggtaaatctcttaaaagttatttaaagcagccaggtgcagtggctcatgcctgtaatcccaggactttgggtggcagaggcgggcagatcacaaggtcaggagatcacgaccatcctgctaacacggtgaaaccccgcctctactaaaaatacaaaaaaattgtccaggcgtggtggtgggtgcctgtagtcccagctattcgggaggctgtggcaggagaatggcgagaacctgggaggcggagcttgcagtgagtggagatcccgccactgcactccagtctgggcgacagagtgagactctgtctcaaaaaacaaaaaaaattatttaaagcaacattacaaaaacattgaatacaataagaaaaccaatgtgcttaatacaactattttgattccttatttcttcatagtgttttgcagatattcacatgtccttcttattgatgtaattgtcatgaactttttcacttaaagctttaccattttcagtgagggtgactaaattttatatagtggtagagtattccttaaacaaaatgcttgggatcagaagtgttttggattttttaagattttggaatatttgcattatacttattggttgagcatccctaatagaaacattcaaaatccaaaattctccagtgaaattcactttgagtacaacctttcaggatcgtgtctgttctcaaaaaattttgggttttggaagattttggatttcagatttttggagtgtggatattcaactcacatattttttgtttgtttgtttttgagacagagtctcgctctttcgcccaggccggagtgcagtggcgctatctcggctcactgcaagctccgcctcttaggttcacgccattctcctgcctcagcctctcgagtagctgggactacaggcgcctgtcaccgcgcctggctaattttttgtatttttagtagagacggggtttcactgcgttagccaggatggtctcaatctctcaactcatataatttttatgtttgcatgctatttattaaatcagtctaccataactttactcttggacatctagattaatttttcacaattataagtagtatgcaagtgatcatctttattctgataatacttttctttgactgaagagaaattccaagaaatgggtatgaacacctttgtatgagcaaatcagtaaaactttagcaaatcacacatttttactattctgataagcttttctaggatctgctgatgtatatgtttttaacaataattacatagttcagttctgtattattaacttgaaatgatcttaaatttttatcacagaaaatattaaacacatgtacactgggcaatagagtctgtcgaacccctatgtgtccagcatcagtggacacccaggatggcagctctgattttgtcaaccctttaacatcttctattactttgaagcaaatctcagtgttatttcatctatacatattcagtgatttatttttttaacctctacatttacatccaaagtccttaccttgtctttctagctgcataacccacatgcgttaagcatcccctgtggacagtgggaaaccattgactgtttccgagcagaggaaggataaagtggtgagaactgtactttgtagaatgaacttgttagctgtctgcaggatgcttgatgtggaaacacctggaagtgaggagctggtcatccatgtccagccctccagctgtgatgctgctgctcagctcattcccattccctcctcccgctccctgcctgcatctgtctccttaccctcttatgaatagttggtgactgagccctgccatggctgaaagtcacagtcaaatagaattctcagttaaaagttccttaaacaataggaacatttgattttctttcatgagttccgaggcccgagcccagggactccagggctggttactttggcagctcccaggtgctggggttctgttttcctctctgtcctctacctcatctcctcttggttacaaaatggctgccacagcagtgcccttacaccctccacgtctgtgtccaaggcaggccagagggttggtgtttcctatgtcctctgggcagagctgggttactgtccagcaggtcaccagggagtttgggaaagtggatttgtggcattttcacactctggagtggagttgcagcaggagaggaaggctattaggtcaagagagcctgccttaggggctcttatttaatagcctgttttacatgtgaaaaagctttagtctctaaaagctttctccaaaaccacaggtaggccatggcagaatgaagcctccaacccaggttttcccacctgaggcagcggtgttcttttccccatctgtcaccttgagtctctgtgcaggaggcttgggtggagcaaatagaggcctggaaatgggtcagcagtaggaacagagaaggccagagaagtgggagatgtggagaaggaccctgaggtgacagcaagccttgaacaggctaacagggacatgggcaggggcagctttggggttttcgcgtgatgccagcaggacagtcatggggaggtccggccttcaagtttctgtcagatctcccgcgttgaggcaagtcatctgttagaggtggtcatcagggaggatggagcccagcttgtgtggggatggctataaagtggaagaggagccagggaagtacctcagtttggaagcctagtgggagagactttctagaagggcagctccatgctgtctcactgtaagaggctgaggaggtgagcatttggaaagtaccattgggcttgctggccacacagtcaagagtgatcatgtgtgtgtttgtgtgtgtgtacgtgtgtgtacacatatgtatcttaaacttactttgaaataattccagacttaatgaagttgcaaaaatagaccagaagagttctcatattccttttacccagcttcccgaagtgttaatgttaatgatctcacatatctgtagtagtgatcaaaaccagcaagttactgttggtaacatagcattaactaataatgaatctgcaggccttatttgaatattgccattgtcccactgggtccagaatccaatctagaatcccatgttcatttaggtgtgtctcagcctcctccagtcttacgatcttgatacttctgaagacacaggccagttattttttagaatgtcccttagtttgggaatttgatgtccttggtgtgccatgtcagggcacatggtattgatgtgtctcatgactactgatgctgaccttgatcactcacttggtcaagatggtatcagtcaggtttctctgctggaaagttactatttgtttgtttctcaagagaacatttcttaaatggacttcttaaaacacaggttctttttagtggctcatcatttgactgtcttcagtagcctctgttgatgtttttaaaaatcaaaagaacatccacttggttagaaaattcaaagacggaagattattaaaaaataaaattctcctcattgtatatcctcctgaaaaatttcctgtgcaaatagtggtgacctttttttttttttaatttttgatttttaaaatttcaatagcttttgggatacaagtgggattttttttgttatgtggatgaattacatagtggtgaattctgagatcttagtgtacccgtcacccgagtggtgtacatggtactcaatatgtacttgtttattccacaccttccacacccacagtgacccttttgacgtggcgtcagtggcatggtggaggtggcagtcagggcttcagtggactgagattcgattggagggtgtctggggaagtgaagacttggactaaggttcctggaacttgagggtgtagcaaaggctcagaggaagggggaccttgggaggaaggaaggcttttcacaggacagggttgcgtggagactggctgtaaaattactttatgtacaaaggactacagatgagaggtggcatcagagtagcgcctgactctgtgaggtgaaaaagctactgctgttttcccatagtgtttttggaatatttttcacaatggtcagtacatactaaagcacatgttaactgatttttcatttattacaaaatgacagggtgctggattctctcattagggatggtgagccccagagagttgttgtttatgggggcattggcagggttctgttcccacacattcaggccagagatttggtacccctgcctggtgctttgcacaagaacctagcattgtctgtgggtgggcactctgggccacagagacacaggtagctggagggcagttttacagctggagagaaaacatgttacctaacggacttggtttaatgaactcctgatgaaagagatgtactaacaagcaccccaataaggggggcatatagcaaatgtcttttagaaataatagaaatggtcttctttaagtagggtagttcctaatgattcattacgtcctttgccagaccctggccatatgttttgaacttgttaggtcttctcaacaatagaatttttgcattatgccttttcttcctcctgtgcaatcttgtgggcaggtaggagcaacagaatgcgggtggtgtggaggacaagggacatcccagagcccttggttctattgcactatgtgagctgaatgcacccagggagtctgtctggcctttcagtgtcggggagagcagtaggatgggaccacgtgggacataggcctgacacacaggtcatcacttagaaatgagcactggacttgccccagtgcctgggatgcagtaggctttcagtaaatactaactgacacatgaatgttctgtgtgcttgctttggcttctccttttaaagaatcacctaataattctttaagtctctcgaattgccgatttgtccttctgtcagataaaatgcatgaagtaagctgatgattctgaataggaacagaatacgttcttggttgatttaaagtataatttagagtttttcattttgcttagagctaatatacagtgcgatgcctgaggtccattgtaaaatcttgctatgtaacctaatcattgttgacaggagaaatttgtctacaatcattttaatctgttgcataataaatatttagagagtctcttattcacttccattttagacaaagcgtctatttgtacatccttcaaaatggtcaaagatgaaagggaagatccttttattggtccctcaggccaagacagagggaaggactgataatcttttcaaaccaagaaagattttggtttccattccaacatccctgagtaatccacaactgtgtatggtactcccgcccccttccctccatctctgtaataaactcttcttccttaattttaattttcttgacaattgaacccttcagttgggtgctatttggctttatccttgttttaaatttccccttttctcatttcccagactgggcagttgttgagtccagaattaactggggaagttggctaatttagcaagggctatagaataaagatctagattagatgcaggctagaaaagccaggctggagtacatactagagaccgcagagacattgatctactgcagatcagatttaactcctcagtaatatcaggtgttgtggctgccaacacagtgaccaggagcaggttggtctttgatgtctctgtgtcagcacctgaggcagggatactgaagagaacatgcctgccatataggataggaatctggtcacaaaggtatcactagttctgttggagtagaaatcacatctggaatgaggcaaaaaaaaaaaaaaaaaaggaactgtctacaaaaattttaaaagaattggcaaactaatgtttttcttagcagatgtgcctttgccatattcctaaggtttccctccctgtcagtcatgcgtcctgttttatgagacccatttctcctggggcctctgactgggccgctgcctggacctgccctctgggctgctgccatccagcaggagtccatagcttcctttcactgtcctgctgggtgggtcagctttgtggatcctcccacccccgtcttcatctttcttgggtttcttttttatttgtgctgaagtctattttcaataatttttttccctagaagaatgttcagaatgtaaatcttctgccttttaaaaaataaatctgaaaatgtccctatagtccttacacttgactgttagtttatatggatgtagaattctaggttcaaaattctttgcttcagaattctgaaggccatggttctgcttctggtgtttctatgaggactatttactgaccatattctcacccttggatgggagcttttcttttttccttctgggtcgtgtggagacctgtcttgatcttggtgtcctcaaacttcatgaagatgtgtcccattttcatcctttctggtaatctaggtttcttaaatctaaattcccttgccttttctttagcttgaggaagctctcttcttctattattgctattttcaatattttctcaccatttatttttctcttctctctttctggaaagcctagagaccagttgataatcctcccaggttgtcatttttcttaaactttctcggtattttccattctttttccatttgtttttttaaccccatggggcaattattaaacttgaaattattaatctcccaacctttctactaagtttttaattttggcaagcaatttttaatatccatgaactcattttttatcataatttctgctttttcatagtattcagtttttttttttgtttctgttttcttattttgtttttaggggtattatgttttcttgatgttctctgaagatacatactaactgaacttttaaaatactcatttctgtttgctgaagtagcttttttcccagagtcagttctgtttattctactcagttttttcttttgagctctagatgtgcccccacatatctcgatgtctttggctgtctgttcatattaagaacactggccagggtagattaacataagtaatcataagtagttggtagctttttttttttttttttgagacggagtctcgctctgtcacctaggctagagtgcagtggcgcaatcttggctcactgcaagctccgcctctggggttcacgccattctcctgcttcagcctcctgagtagctgggactacaggtgcctgccaccacgcctggctaattttttgtagttttagtagagacggggtttcaccatgttagccaggatggtctcgatctcctgagctcgtgatcctcccacctcggcctcccaaagtgctgggattacaggtgtgagccaccacgcccagccagtagttcgtagctttacaggcaggtcatttggtctccagtgagcctcctgagcaggagggtagctgggcattcagtgtatgtgcttacatgggcagaaaccttagaaaaatggcacaggaactccaatggactcaggttcaaaagggtgtgtgcaaggggtggggaaaagatgcctaaccaagggcaaatatgggagggtaacctcatcctgtaaaataagcagagacagaaattctaagaacagaaattttgttgttgtcactgttgtttttaaaagttatctctagagccatggttcgcacccattttgcacctttgggggcatttgacaactctggagacatttttggttgtcacaagtaggggaggaggacatgctacctaccagcttctagtgggtagaggccagggttgctactcaacatcctaaaatgcacaggacagacctcaccccaaagaattatccagctccgaatgtcagtagtgctgaggttgagaaacaccactgcagaggaagatgatcaaggagagggtggggcaggggaaggagatcaggaagcatgtccggaagcatacaggttcctattttgcctgcacactctgccaaggggagacttgggtcacactaaataagcttccatctcagagcagttgttaaggtagattatctgacctttgctgtccagtagcatggccactaaccacaagtgctaaactgaaataaaattacaaatttaatagatttgcactagccacatttcttatgcttgacagccatttgtgacttctgtactggatagtgcaaagataggacatttccatcacagataattcggctagacagagctggtctagacagtattggtgctgttttaaggaacttgaagactaggagtgctgttatgtttaaaaacataaaattttgcttttcaggatatcaggggataaggagagtttgaaacaaattaacaattggtaattttgaaattttatagattggttgatctgagttcatcactatcctcacacgtggacatggattcataatgtgccctccaacacaaaaaccacttgcatccccacagcaactcccgcccctgcctgtaccctttctcacagttaattcatagttaatatgagaagagggttggaactcaagccagtggacaatgagagcagctttaggtgttgttcaaaaaggtccccaggaagctaccgccaggttcaggtaccatggtagctggtagtggtgggtgagtgcctttactcctgtgctttcccaaaaggatggtgaagaatctgagccctttcatcacatgatggtgagctcagaggcagaggcctcagtgggaaggatgagctggacggaagtgattccaccgtcttggtggtcaggctgcattaggagatctgctttgtgtgagaatgactgaatggaatgtggagatgggagagagaaaatgccaaaggttggaaacattgttggaatcttgaatatgttctaaaaatggaagactttgctcttgtagcccaatgtattctaagctcatttgctgttttttgagcctgtatcctactgaatgcaaagccatttgaacccttcttatgtggtccattttctctttggctgtctgtgttattggagccatgactgatcaagcctttagctagaactccactggaaaaggggattagcttagtgagtgtggctttcctcagttttcttttcactcagatttggataaagaggataaatgataagtaaaaagctatcagcagttgtgtggtttgttgccaaagattcagcagttgttggttcgttgccaaagattcagcagttgttggttcagagtggggaatcctggggtcattactgaccagatagcttgcaaccctttctctatgtcaggggctacaccaaggcagttgtgtggtttgtagaagtaggaattgcgccacaccctgtgttcatggtaccagatttgcctcccctcactgaggtttgtttggggggattgctcttcgttggcacctggaaagacctttttatgaaaagcatcattgaaattagaaggcataaataaataaaatatcatctctttgctgttgctttagactttcttcttatggtagtgtcttttggaatagaatcatcttttgatctccagtaaacaggtaacctgtcaggtgggtgggattgctcctgaatgtgggcagttcagcatttcaagttgaatttggaagagaaaaaggcaaattgggccttctttaagggtggagaacccactacctctaaaaaacaagagtcgttgctttgacagtgatgtagaaagttgcctctgaggagctggattaataggtaatctcttgaaaaaatagcacagaaaatgaccttttacttgtgttctctgaggcagatcaagtggagtttatttctaggcagaaaaacattttgtgtgaattatatctaaggaagcagtgtaactcggtgctcagtaattagccctgtcctggtatttaagactctgaaaggaagtgctgccattgtaattgagttctttttaatcccgttagcggtgcatttccatattttaattgaatgtttcggaatttagcaggtgaagcctttctgagtgttggcattatccatcaggtgtgccccctggagaccccgtgtgctgagggggctgaatagcagtgtgagcctcggcctgagcagtggtgtggggtggatgccactgctcttgggtggccccaaatgtctctcactgttcccctgtaacttgccacttttcacctggatgttcatcacctgtaagcagttaacgtctttatagtgagatgcagcgttcagacgactcccgtttccttagctcccttagacatggtcaggattccagttatattcagaaagagagtttcgttcgataaataaagcacatgatcatcaattctgggaaatgcagagacctgtttcatctcatttcaaggttttttccatttaaacaagctccttagctgtttaaagccacacacacagttgttgtttaagtaaagcaaccctggacggactgcagtagacaagattgtaccttgagtgctctgtgtctgggactcaccctgcgtgctcactcatatatgcacctggtcttacccaatataccaaactgtggtggtgggtgtcttggaaatgtgccagcttctctggccatagagtgctgtgcagtacagcagcaccagactctaaagggagcgagcactgatcaactggaagggtgagtggctcttttcaaggtgaactggtggctgtctgttcacaagaaagactctttgggcatcatgtgttacaggcttattgtctactattgaggggtgagtcttagggctggttcttttctctctggactagtgggctttgccgcagaaactcttacagtacatggtaacacacacgcgcgcacacacacacactcacacactctctcacacacatgtccttatgctgcttcctttccttctcagatcagctgaagagaagagtagaggggacttgtcccttggcacctctccgactggcttacaggcctcccaggatcaaggtttccttgtgagtgtgtctggtgagggtgtggcgtgaggggcacctttccagaaccagccagtgtttccaactctccatgagtgggcggggctttgggcccatgcattaggggatggttaggagcttggggagacagggccatttctctgcctcttgaaatgtgcctggtcccaattgagatgtgccgtgggtatacagtacacactggatcaaagatgtagtatataaagaaggtaaaatagctaattattaacatgtgtgtgtgtgtgtatatatatattttatatatatattatatatatattttatatatataatatatatatattttatatatatataatatatattatatatatattttatatatatataatatatattatatatatataatatatatattttatatatatattatatatatatattttatatatatattatatatctatatatatatttttttttgatacaaagtctcactctgtcgcccaggctggagtacagtggtatgatctcagctcactgcaaccttcacctccctggttcaagcgattctcgtgcctcagcctcccaagtagctgggattacagccacgcacaaccacacctggctaatttttgtatatttagtagagatggggtttcaccgtgttggccaggctggtctcaaacttctgacctcaagtgatctgcccgcctcggcctcccaaagtgctgagattccaggcatgagccactgcgcccggccacgaactgctgtaaacatttctaaacactcccatttttatacttacctcctcacagatctgcacaaacagttcagggcgggcagtggtctgttgccctttctttgagcagcactggcttagagggcaatcttttctagcgctgttgtcaacataaggagatactgccctcccacctgcccccgtggtggcagcaggagtgccccatacctcctgtcatctccatcagttctgaaggctgctcaaaatacaggtgttttgtattaagtaaaagcgatgggtttgcagtgcaaatacagcttcaagactggacttcctccccacttaatcgattgccactgctgcgtcccttctttgtagaacttctggggctatctctgcctgcctctaggacaacagtgcttgctgttagactagttcagactgtcagtcttcacatgttttgcaagcatattgatgtacagagcgtgttatttcccagcctctgttatagaataagaccctttgaaaagacttgtacacaataaatgtgatcaataaatatgatcacaataaatatgatcccccctttgcaaattccttgcaaagcccagggttttatattggcagccctgcacagaaaggtgcatgtttatgtaaatcaatgtggtatgtacctagggtgatataatcatataatgagctgcagcttctcttcctcttcatcaccatcatcatgtttgggtaaagatggttgccatttccctccctcatggtcattatttctgtattactctccatacctccttccatttctttctggaaggtgttgaaaaatctttaccaaccatctacctggctcctaaaggtgcaggtcatggctatgtctgagactggcaagttctgtccacaggtctcaccagatggttgggcagtcctccatggtcatcacctgtgggcagacggtcactaagggcaattggggggacagaatacctaggctgattggagtcatcctttttttatcagagtgccaggtagttgaatttgtgtaaattagatgttctcatgatgcaatttataatacccaggtgtacttggtataaaacttctcctggggaacctgacagatgaaaacagggaatggaagcagctgacaagtcaggacattccaacttaccttcatgcccagaagttagaggtcagggaggggtgggacactttcatttgtgagtggtagttctttttttttaatgcctggaaaaccattagaaaacaggcaatctggaaactttgggccttactcctaatttcatttttgattttagaatgtattagggtaaataacttattctgcttgtatttgaggatttgctgacttctgagagcaccatgtattcacttccattatgaatagggcagctttatgatatattgtctacattttggagtattgagaatgaaggggacaagaggtataaactttgattgtcctgggcaaaccagaacatgtggtcaaccctagttatgaagatcaatttaggttattcatcctaaaaccagaaattttgatagaactgacaggttaggtatcatgtcttatcctaataaaattttctattaaaactatgtaaattcagttttatgaaataaatctataccaagatcatttcataaaaaatggactttttgagaaaataaaaaatgacattgtattttcagaatctttcaaacatattctgatcttttttttttaattgacagtgtttgaaggtaaatagtgaccatggtttttgttaagaattcatatgtaaaatatgtcccttgtttaaaattatctcagagattactctcattcaaatctttaatcagtcagtttattattcataagtctggtgtttctaataaaattctaccacatgaaacagaatggtgtttaataagataataagctttataaaatgtaaaagtgaacaccttaattattttaaattatatcaactttagaaatgactgtataattaagacttgcctatagcttagaatactcttaggaaagattcactgtactacttctcagtcaacagcccttaaatgcaggtggctgacagtggcctgtgttaccaatgtaattggacggtgacatgcctctggccctggatgatagtgccaccagagccacatgcctcctgtgtagagccaggaaggggctctgtgagtgagttgaatcatgggcccgttttccctgtgttctctcctttggccatttgagggttaaggaggttgggcagacagtttttgccttgatgggtactggatactcttgtattcctatgacagtacttgaatttttcgtgaagttacttgaaatcactttggttactttgggtctggatcttatgatttcttaggtgagtctggagcagtgctcagtaggactaattcttcccactactgcagtgagtccttcctgagctccatggagtggtgggagcaggcgctattctcagccctgtgtgagcgcaggtgttgtaagcactaatcttttcctgaccttgtgtagtttctttacctgcttagtactcagctggatgctccaggggccttctgcacaactccactgttctccctctgtgcagctgtctcctctccagtactgtgtcctgagtgctttagctgagtggcctccgggactctcaaccccatctcctttactcaggaagtcctccagcctctgccttggtttccctctcatactgtgacctgtgaactctccctaggtggtcagatggagctcccatggggcttacctggcttgttgtttcctggcctttgttgcctgaggtcctgtgtcttaacaactgttgtttcttaggcttgtcctttttttttttaaacttcaatgtgatggtgtgaggataaatttggttcctgttggcccatctgggacagaagcagaagtgtcaggacagtgtttttaaaaaatcatgatctggtgtaggtttttttctcgtgagctgttcttactctgagtcctctttctaggtcaagggcggtatctgggttgccttgaagtccttcctgcttcattgtgcttatttaggtagaaaccttatttaagaatcagctcaggccagacacagtggctcatgcctgtaatcccaacactctgggaggtgagcaggaggatcacttggggtcaggagtttgagaccaggctggccaacatagtgaaaccctgtctctactaaaaatataaaaattagccaggaggccggggtgggggttgccgggggtcggggggcacgtgcctgtaatcccagctacatgggaggctgaagcaggagaattgcttgaacctgggaggtggaagtggttgcagtgagccaaggtggcaccactgcactccagcctgggtgacagagggagactccgtctcaaaaaaaaaaaaaaatctaacttcttccacaaatatttcttcatcaactccattctgcatgggtttttccttagagtacttagggactctagtgttcagtggcatactgttaccagtgtttcatctttgttttacagtgattaagtcttcactttccaaacttcttgagccaggggttcttgtttgtaattttttgtgctctccacagggattagcacaagaataagctcataaacattagcaattgtgttttgaaattctttcctttgtgaccacaggacacatatgatatcattttcataagtactgtgtgtgtgttgtgggggtgggggtgggggggaagccaggatgaagtagtgactctaatcccatgatcagatgtcagcaagactgtccttgctcccgcagtggtctctctcacttgtgttttagctggctattcatttacaatggaatcattggatcataagtcagcatggacctcgacccgagatcccatatgaaaacgaaatcttaacaatggagacacatgccataaattaaggtaattccctcccacaggcttttcaataaagtagcagtgggcccactgtgtctgcaaaggtccccagtggaaataaaacccccaaatgcacatatttgggatccacaagcttaccggatacttctctactgtggcttgctctaagcatagaacaatcatgaccttacgtggctcacgcagaacccattttaccagtagctgtgtggacaccggaatgttttcttccttcagctcccccaaatcctttcgtgtacagactcccctccttaccttgccacataaggtaccagtttcatcagaggcatctggcaaggctctcatggtttgactgtcaccagatctctctgtaatgggattaccattttaacctgttctctttccctcccctgtcctgggtttccactttcccagccttccttcttcctttggccttggccagaaggggctgctggagagctgttcccggggctcaccatagcctctgctccccctcccatggcctcctgccgaggctggccctccgggcatcttttgcagaggtcactctttgaaagatgcctttttttgtgctcctctgccaattgttctttctgtctagtgtgtgtcctcctggcatttcaggagctgtttcatgtagtgtctgactttataggtgtgcacctaatgactttaaaaggcttatttttaggttgctgttttcttccccaaacctttttgctccttcagaaatgtcctcttgttaaaatcttcccagggtttctatgcatgcttgagtgcttgattctccagtttgattggatgagcaagccctgcttcctgcttcctttagaaatattccaccctggaagggacctgacaggatggtagtggctgtgggtgtctgcattggttgagctgctcagtgtttttggtccagagactggagcaggtccctggtgcacagaaaaggatttggaggatccttagcctgggttcacgtccccaccttcatcttctgaccgtatcctccgttcctcctttgtcaagccttaggctgtttttttctgcattggtcttccctggacattcttttacttaccttggttcttcgttcatgcactttctctagactaaggtttctctctgctcatatagttatccccattcttgaaggctgcactgaagaccattcagtgtcttcggcagctcttgatgttctctcctcaagggcaggttataccctcattttgctctcctgttgtgacatagcgtggttgtggatagagtggtccttcttggatgttctgttgccttcacgcaggtgagctgcccagagcccagcacggtctgggttctcatccagagcctggtctgacctgaggagccctgacctccagcctgcactccaccgtctcctggagatgtgacctggaaggcccaaaggtctgcacgctttagctcaccatctgtcagatgggggtgactgtgaggcctacccacccttcctcatcattgttagagtcaaaggaaaggcaggatgagaaaggggagtctattaggtaaacacagagcaaattattttgccaagtcatttaacctcttaggacctggttttctaacctgtgaaacaagaaggctgtactagatatgtatttttggaccaaataaccttttttgttttcccattcccaaccacttgtgtgtttgtttatttcctctgatctggggtactgtttcatcaggcttcttgttctcatgcttgggttcaagctgtttttattaacataaatccccacattctgtgctgatgatttcttgctatggggataattctctttttcttcaagtttccttctccttggagctagttttaggacttttcattgactctactcttcacaggtagaggagactagttaggataagtagttttttcctttgttcatttctgtggctcctgtgcacgtaggcttctgaagaagcacagatccggggtggtggaattgacagacactgtctcctgcagtgctgcttggaaccagggtcaaggccatcgtctaagtgggacacagtgaagctgtcctttaggagcactgaggcctcttctcttggtgtctttctcagatgaggagcaggtaagaagattagttttgatgaatcatccaagtcctggagaagctttaaaaaatttctcctcagggcaaaactaatttcctatttcaactagaagatttctttcaataggtgataccttcagtaccccaaggagaaactgggtgccgacactcctgccccttcagccaaacgcctgtgtttggtgatatgacattggtgatatgaacgaatgtctattgtccagggcttttaagaagtctctggttccagtgcacaggcctttcctagattctaggctgtgcaggccttgtccctgcttgtatctcagtgacagcctgaggaccaaccctgactttggacaccaggctgggccagctggggctctgcctttgctgcatctgccattggtccaccccgagtgggtgtcatccctgagtcctaagtagtgaccaactactgtcatacactgtcccctcccccactccatttcccccagggtcagaacacagcaagccctgtccctaaacttgtactccagggacattatggaagggtgcctgctcccccagatcactcccttgactgggacccctgttgttgatggtgtgctccaggctgagtcagcctccccacccaccctagcagttggggaactcttctgcatatctgcttcatctttggattgtggccctttgaaggctccctgtaagctccctgtcctgcagtggttgctaagtggtgtctggccgtgtactgggctacagcattcacggtcagagaagcatcagacgagaccgggtgcatttggggtgggatggccatcgactgagaaacatcagaagaggaggctaaattaaaccaagtcacaaagtaaagcatataattactatttctattctggtggggtaagagatggaaaccattgtttaaaatgaaactctgggattttctgtggatgtaatctataaaatggtgactaaccaaaagttggcaatgctggttttacttgcatccctagtgacaaattatttggactcacatggaaacatttcccataaactctaaaggctcatgtgtcaggttgtcattcataggcttcacattctgggcaaacaacaggttcatgtcctgcgctgctttatctcgggaggagtcgggtgctgagtctccagcatgcagatattctggttgtatctggagtctgttgttggcactgactcttgtttgggcttagtttatgtcatgtttgaaacacaaattgagtgatttgaggttggacccccttactgtactgttgagtttgtgctaaggaaagaccaatcctgctgtgctcttggtttgctagaagcttcaaactgcttttcaggcatttggattcaccagcacccagcatgtttcaatggtaccttcttcatctattttagagccatgtgtgttttgcagcaaatgtaacccatgtggtttgtttcacacacttcctccaaatattggttcaggatctgaacctttgatatcccagaagcatttggattctctccttgaaaaggctgtaacatttccccacttcccagaaaggggaaataatgttttaagactgaggaaggaactcaagctccacagtgtgtctggattcaggtttgtggcacgtggggtctgactggttggggaagcagcatcatgtcacaccggcccctcctcactggggtccaactctcaccaggagacacatgccacccgcaggtggctgccgggtctcacgggaggcccatggacttgtccagggtctgcttgctaactcacagaaggagtaaatctaaactgacggaggcacttagggctttattttttctttcttgtttatcttgaaaggtttttagaagggagatgtcacagtcttttaaaaatagtaagataggccagcctgtggtgttgtaaatttcaatttaggtaaaagagtacacttgactcgaacaatgtggaggtcaggggtgccaactccccactaagtggaaaatccaagtaaaacttttgacttctcaaaaacttacctgctgctagcctactgttgatcagagaagccttactggtaacatcaatagtcaattaacacatattttgtattttgcaaaaagggtaaggttttcatgttttcttgcacagctgcaacaatggcttcatgaattttcttttttttttacaatggttcttatgctggattcatttatcatgaaatggtgggggacggcagctgcaggcctcaatctgaggtacacatcaagcagtcaagcaattcagcttttccttggaatgttgtaactttactctgcttcttgggagcacctccagtgtcattagtggcactttgtttgggtctcacagtgttattcaaggttcaagttattgcattaaacacagtgaaaaatacacaagaaccaggagagatcactttttactgcaatctgcaatttactggagagatgactgctcacgggagataattagcatcacatggtgttttaagtggattcttgcaacaggtgagttcaccatagtagtaacaggaagtggctacaaaatgattacagtggtacagtatgtaccacagttagtttgatgcagctactatgatttaatactgcatctttacatgtgtttacatttttcttgactgcaaatggtgccatgtacagtctgtgtataagtttttggtaaattttagctttttataatagatttatgtatatgttatggcagtaagtgacaaaaatagactagtatctatgtatagtttatacatagtaaattcgtgacatacctaactttttctcaatttttccatgtttttaggctacacagtttgcaaattttcaaattgtctcatatcttcaaaacattttccagcatatttattgaaaaaattatgcatagtggattctcacaattcaaacctgtgttattcaaaggtcaactgtggttcatcttctgtaatggaaccagtttattttcttctgggtctttgattgcaagagttcttgttactttaatcttttggactgtcccctcagaaaacttagagcttaagctaaatgtgatcagctagaacttctcattaaccagccattgcatgttaattaaaaactcagtctacagagggtgccagtggatgtggagaaattagttagaattctcctctaaactgaaaaaaaatatggtatttaacagtccaggattaaagatttagaatgtaaaaagacttaggaaaatgtagctaaaagatgggctctgtctgggttcaaaaggaaacaggtttgggagcctcttgggaaacagccaaagaaaaccaaatgtttttaggttcagtttaagattagagttagatttttcttaaccagtctttaccagtttatcctgctcaatcttgggtttatttctttaaaaatattcaggaagaacaatgagctttgaaggttccagtaatattactttattaaagatatttattttggataaaaagctggagatctatgtttattaattagttaagttagttggaggattctttcatatttctgaaagacaaccactaggactgtgtgaccatagggtgctgttacctccaggtggcagcgaccttcaagggccagtgtggcaaccagaggcagccatccctgcaagtcgtggcacttggtggggccgtgtgggatgatagagcctgggattccagagggaggatgtatgggataatgagggggagacatgtttacatttggaaaaattagaactgtggagcaaagagctgcctttagggcaacaatcatctgtgtaatacatctatattattgccagtatataattgtgataatgtgtactatgcaatgctatatagattatataaggttgaaccatatgaatttgctgctttttgaccatttttattacaaatacttcagttttgtatggttctatctaatataatgttatacatatacatgcacacacacacccctctaggttcataacattcttaaaaagagattggcttgtagttcaagagaaagacaccagctattagttagccctctctaagttaaggagaacttattttatgttccctttggcccacataagaatccagagttaggcatgtcaggggagtggtagctctgtcctctgccttggctggaggctggaccaaaagcctgacttgccacaccttctgccctgagcagagagctacaaacctttgtccttccttgggggagcatggtctccccgttttgtacagatgctcctagacttaggatgaggttttgtttcgataaagccataattaattgaaatattggaagttgaaagtgcatttttgactttgtatgttttcaacttacaatgggtttaccaggatataacctcatcctaagtcaaggagtgcactgaatgcttattactttcacaccatcttaaagttgaataatcttgtaagttggggattgtctattttttgtgtatatttctgtgtgtgtgtgtatatatatatgtgtgtgtgtgtgtgtgtgtgtgtttgtgtatcttgattattcatgtatttctccacatctcctcctaccctaacctatttcctaaaagtatattaggcagagttcctcttattagtgcagatctaaaggcctggcctaggccagtttttgtaggtgagtccttaaaatatggcatctgaggaattagccactaaactgtcccatcagttggagtggctggaatggctggagcctttacatgaaatgggattagtagaatgtcacattatggcaaacctagtgattttgaggacccaagttgtggaaacaggcgttgtttgtggttaccagtgcatagtttgtggattcagctctttctccagatgaagagttcctggagactgcgaggggtgagtcaagcctccgagtggtactgctgctacacatggcagaagagggacagctgctgcttccccactgggcatgcccctcctgtcccttggtgacagcagtccagcctctggtggtggctgtgacttaagacacttacttttatgtaattctgtggcaaggcatttttaatcattttgtcataataatttattttgtcagagttggggcattttaggcaattgaaatctgttgacattctagaaatctggttcttgagtctgatattgttatcaccatttatcaaaatacagctacatttactcagttaaaagcctgaggcagtaaggggtgcagtttttaagattccttacagaacaaacagataatgattttcttcagagcttggatatcagcctcactggtataaaaggagaactgtttggatgtatttcttacatgtaaataacatcagagtttcttctgggatttgcatgaagaccatggctggtttgtaaagcactagatctagtggagtatatgccacactcaggccatacctgtaatcatttttattttcaagactctagtgtaactttgaaaaagtgtatcacttagtagggaggaaaatgaccaattggttttctactattgactgttaagagaacatttcatactatcataaatgcagatcagacataaaatatacttaatactaactaggtaacctcatttgcacctacctgcagaaaaacttttcgaaagtaggcctccttccttagagaagataaacttagcttttgtccctgaattaccttcataagattttcaggaaatatctgtctaatttattctgttttaacctttttccttcaaatgcatctctgttgcatttgtagtgtttttatcagcagattcttatttctactcccaacaggtaactttaaaagttttttggccaagcagcttggctcaaacctgtaatactagcactttgggaggctaaggcatgtggattgcttgagtccgggagtttgagacaagcctgggccacatggcaaaatccctctctacaaaaaaaacatacaaaaattagccaggcatggcagtgtgtgcctgtagtcccagctactcaagaggctgaggtgggaggattgcctgagcctgggtggtcaaagctgcagtgagccgagatcaaaccactgcactccagcctgggcgacagagtgaaaccctgtctcaaaaaaaatttttttttgttaacatgtaaagtatgattcaattatgatttccttaagacacattaatttagatattatatccagcaaccttgttaaacaccctaatgttttataatctgtgacctgcagattcctttggactttccatgtagatagtcatgccatctgagattaatgacagttttgcttctggcatgacaaccgctatgccttttatttccttttcttgtcttactgcactgtcgagtactttagtataatgccaacagaagtggcgcgaacagactgtcctaattttagagacaatgcttctattgtttcaccatccagatggtgactgctataagtttattttgtttcaataaatccttttttaataggtttgagcacgttttttttctgtcctagtttcttgagggcatttaccatgtgtggctactgagtgatgctcatttgttcatgtggccacatggtcctcctccctcttcacttgttaatgtagtgattaattttccaatgttaaactatctttgcctttcttggcaaaagtcagatttggtcatagtatatcatcattttgccagattttagtttgttaatactttgtttaggagttttgtatctatgtagaagtgagcttagtttatcattttccttttttgttctattactatctagttttgtaattgaattaatattatcctcataaaattaatgagttgggaggatctctttcttttttctgttgctttagaagaacatatctgattagaacgatctgttctttgaatgttggtagactgtgtctgtaaaaccgtctgggcctggtcgttttcttgtgggaagttttttttcctcccactttcaaagccaggcttgtttcctattttaagttttattttagatatgttctacagactgtgaaggtgttttggagtggttgtggagacacagatgggaagctgtgggggctgggtagtcagtggcattcctccttcagctccagccctgcgctctgtcctggaagaggacaggtggctgggtcacacccgggtctgtgcagtgtgggagatgagagacatcagtctcttcaggccgctccccagaattaagtcagggcaaccccagggctccatgaggaccttggcagtgttttcctctgacccacataggttagccaggctctggatgccattcggtctgtgctagccaccatcgagggtggctggactcctcaggcccatctgatttcgtggctccttgagtgcacatgctgtccaagttcagacctcatccccactctcctctagctatgccctttcctttggcatggctgcatgttcttacagctccagtagatgtaattcgcactgtagtctgtgggcatggggttcctgggagttgggccctgcccatctggcggtaccaggcactcagcattgtgcacaatcctaacatgcccaggccacttggctaggagccagtgttgaaaaagcagagatggcacagaaagggccaagtggagcaatgcatatggaattggacgtctgcactttaagtaaaggagacttaagatggttgtggaggtgggaggggaaagattttatgttcacatttattaagatactgcatcatgtttgatagcttttcttgagttgatgcctggttgatggagatttacagtcttatgttaggttcatttggcttagatggaatgtgttttttattgactcattcaccacttgcatcaattttatgactagagtgtgaactatccagctgtattattggggactgtgcttgttcatcatgggcacactcagtttccctgctgagtaaaataagagacatcatagcaggtaggtggacctgctgggactgcaaaacatggttttaaggaatgggctgtcttcggtgtagaagtgccaggtaaatggcaggctggtgctttggaaatcatcattcagatacagcagatttggagcatgccccaaatttatttatcagtttctgtcaaaatctgaaaacactgtcttatttttctggacctaaaacacacagaaaagtcagcaccataagagagggaaaaaagacaaaaaaagtcaaaacacatagaaacaacatctaaataaatacagaagattccattattcagttaatgatatgaagttttgtgtgtgtctggcttgtggaaagagtcatatcactttagaccagagtttctcagcctcaccactcttgccattctggggcagaacattctttattggaaggggctgtcctgtgcgttgttggatgttcagcagcatctctggcctctgcccactgggtaccagtagtgtgcccccacagctgtggcaaccaaaaatatctccagagactgccagtgtctagaggggcaggggaaggcaggagacaggaggagtgctaagtcacctctagcctagagcccctgcattagatgctttggtgccattgtggtcatcttggctattattgtccctgctacttggctccataccagtgagatagaggctaatgataataataagtatatttcaggaaccttagccagtcttacctacactgcctgtccaaggcatttacaaaagcaggaatgttccaaggaattctgtatttctaaaattttaatttgtggaatagagcccatggctagcctgatcacaggaacaaatgatcatattccaagcaggttattttctgtagccagctctgatatccacactacagtacacttggttttgtatgtataattctgtcggtgcagggtataatagtctgtttgagaattatttaataacacaagagattgttacaggtgaatttacatacctcaaattcatgcgtgctgcagctccattgtagaggaaaaggattttaacctattgcttcctacacttaatgattctatgagttcagatatttttgctacaggtatcaaaagataaactggcctaaatgataaggacatgtattagatcacataaccaagtgctagaggtcaggctctgtcaattgagtggctcagtagtgtcctcaagggttcagactcctcctgttttccatttagttttctaagtgtgttggcttccctcatggtcctagagtcaccaccacatttccaggcattgcgtggagacacacagcaatgatcaaaggcggaaaagggaatgtccctatctcctgcccccttttaagactttcctggaagcccctggcaaacttcctctcacgttcattggccagaattccatcatgtactttgtctcagccaacaccagcaagaggaaagccccatgagctctgtgatggtttagactggagcccgtaggaaggacctggctgtgtggagaacaatccactaaagaggagttccatgagcaaagaagaaggtggggcagcgtgggcaggtaggcacatgggtacctcccactgtggtgtgtgggcagtgacacctttgtgaaatttgtattcataaaatttttgtattttgtgtgtgacttggggagaggggtgatgatatttattgccctcagccttctgagcagaatggccatggagaattctattgcccaagacctcagttcttctatcataatactcatcgttttttcaaaaattggctcatactaagtgattagatttctagagtttaactttttaataacaaaaagttcaaaatttcatttgtaagtagtaattattataaagatggactataatgtgtgaatatcaccttacaactcagccatagtttatgtatcaagtttgtaacctagaatgtgatttagaatctgtagtgggcactaaatattgtatacactttcatttttcttcaaattgacctaaaaacaggagccttccctcccctggaaagatttaaaatatttgaaaatgttttttcacttccaaataaatggggatctatttcatttctgtgtaagatttccaagagaggaaatccacaagctgtcagcaaccttcctggaacaaggcagtccttaactaatagaaatgtgactggcatgccccctcttttgttctttcagtggtggaattgatgcagggcagggaagcccctacatggggctcagcccgtgagtgagggttcttggctttacccaggaaagaaccctggtgagctggaagtagaagaaaacagctgttattgaagaggtggtgttacagacctgtggctgttcctgcagagcagggctaccctgcaggcagagagtagcagctcagggcagttttgcagtcatatttatactcactttttattgcatgcaaagattaaggggtggtttatgcagaaatttctagggaagggatagtaacttttgggtcaccaggtcattagcatggaaaggggcagtaactccgtggtgttgccatggcagtagtaactggagtggcacactgatgggcgtgtctgatggaaagctgcttccacctgaaccctgttttagctagtcctcagtttggtccagtgtctgagccccaagtcttgagtcgagtcccacctcctacctcagaatgggtgataaatggatttatatttttatttgtagttcataagcaaatagtttgaagcaatatgctttagcctctgtcctgatgtcactggtttaaataatttgtttctgtcaggttgagttctcttgggtccaggtctccaagctgacctggcaggagccactttttaatgacgctctttctctaaggtgctccactcgttttttgcgtaagatgctgtaatagcctcactttgaactctccgaggtgttcctgggctgggctcagcattagagcctaatcccaagtcaccctctgcttacagaggctcacatctctcatttctctggatgatgatggtcagtatcaccatcaccccacaccagtgtatcctcagtttcctggttttaactgctcagcagatgtccgacaaaaaacctcccgatatcatcagtgttttctttcattcccaggtcttggtgtctggtgtgacattttatccctaggattcagacagatcttccaagatggaggctgacacccagcagaactgggagcctccttgctctgctccctccaggcagctgggtactgtggtcagttctagacaactggcatctttgtgtgtggctctcccacctggattgttttgttatagaagagggaagccagttggtgccaaagcattggattatcctcaagttcacttgtctagatcctcacatgtttagggatgtgtctgaatttacaggtgtgggtggagtggagtcgcctctggcatagtcattctgtgaatcattgattgaacctaaaatgcaagcatttatcttgatggtctgaccttcctagtgacaatgggggcattttcttttcaggcttcgtcaagtgcattctttgcttgtttgtccaggaatgttcctgatcttgatttaataattgaaaatcactcaatttatctgtcagcctctgagccccatgtttaccttaattctcatcatgaaaattgcattgtacaagtaatctaacacaaattcagcaaagatgaggggggtgtttttgtcaatcaagggtttttttcctaccaggttactaacataattcagcctgtcactcatcagggtaaatgtcagctgccttcaccaaaatttaggtgccttgtgcatggatgtgaagagactcaaaatcctagaggtgtttctgagggaagccccattgggatgactaggaattctactccttgttgtcacttagtggggagtgttgatactttggccagcaaagaagatccagacttagtcctgggggttttgataccattcccaatacctcttcctccccttgccccctttcttgggggacagacacctaccacactgctcttccccgttatggtaattaataccatgcattgtacttttgctcacagtccagacccaggagatggggacacagtgtcttcttaagatgctgcttacttataggggccagaaaggactctccttggagctgactttatctttcccagagaagggaagtggaatgctggagacaattgaagagttaccaatctttgcattccaggcacctgttggccttggctggctgagagtctgtgaggacgggtggactcttgggtgctgggacccgtggctatggggaatgagcagagtgacagaggagtccttggcaggtgctgtggtgaggtagcagctgtagtacctgggacttggccgcgtgcctggaggcctgggcagggcccatgggtgggagcagaggggcctgcctgagctttggagctgcatgacagaatgtggattcccccacggctcccgggggtgaggtgttgtttagtgggaacctggagggcagcctcagcccagccctgagagaagactagtgtgaggtggctcagaagccccaggcatgaatgtaggcttgggcaggaaacaggatgaggtggtagggctgaggagggtttagaattcctggagggtaaagtgcaaggcgagaggaagtgggtggcgaggagactggtgaggctgtttgaagctgggtctgggtggacttctgtaacaccttgatgatgctcttcggccctgaaggagagggcggccctggaagggatctgggtggggagagacgttattctgtaatgagttttagtgagatattcacatgccacacagtccgcacatgtgaagtgcacagttcatggcctgtagttcattcgcagagcaaccatcaccatgagaagacccctgtttttagctgtcactctccccttcccaccatcctccccagccctgagctgtagatttctctattttgggcattccatgtaaaggagggcacacagtatgtgacctttgtgcatggcttctttcacagagcagagcatcatcggtgtttgtccatgccatggcacgtgtcagcacttcagtccttatttccatgtaatcttccatcatgtggatatagcacacttcactcacccacctagcggtggatgggcatttgtgggagaggtggcctagggtgaagcagaggggaggctgatggagaagatggtttgttcactgtggaaagggggttccagggagcttaggtgagaaggggctgaaggaaaggtagcagtggcaggaacattgtgagtgtgtgggataggggatgggaggggcatgggtaggaccctggaggggttttcagtcccttcatggacttggagactgtcagcccctcctggccttcctgcctccttggctggccttgtctacttgctgaatactggggacccctcagccggcaagagggccctgcctgggcaatgggctagctaaaaggtcccctggagtgtagggaagagggcggggccatcaccctgagtttggcttctggtcagtggcacagcaagacctggctgggggatgggagtcagcccatcttcaaagccactcgaactctgattgaaaaccgtgctccctatgaaacctcagtttaagataagccctctagcccagcgcttcctaaagttcaaggtgcacaggagtcccgtggggatctgtcagaatgcagattgtggttctgcaagtctgggtggggtctgggagtctgcattctgacagcactttggagatctgccattgctgctcccaggaccagcctcaattccaaacaggtcgttgctcctcagtcctatttcggtgtctggatgtgggaatctgtaagtaggggaagtggaataaccaaagggatgtggccctaaggttgtcagatctttttgaggcctcatttgcataggaaactcacaagagcagctgttgaggctggcagcagtgctttctcagagcacaaagcagtgctcatgtggcaggaaaagcccctgcctgggtcccctgggtctgtctggtggtaggtgtattttgagtcaggagaataaaaatagtaagatggctctgagcattgcatccattctccaatttcattgttagcacacttcctcccaggagtgacaattcctgacagcatcctgaaactgaattgaagctaatgacaaagatacctgggagctgggcacagcagcttttgtttgtaccaaacctacggccgatgcttgcttgcttgattgcttaagatagggtctcactctgttgcccaggctagagtgcagtggtgcagtcacggctcactgcagccttgacctcctggactcaaaccatcgtcctgcctcagcccctcaaggggctgggactacaggcatgtgccaccacgtctggtgagtttttgtattttttgtggagtggggtttttccatgttgcccaggctggtcttgaactcctgggctcaagtgatccttccgcctcatggctaaggcttttatagatacattttcttctacagaaatagagttcatgacagttttgtcgtggtttgctaacatttcttttcagaagtaaatggcagtgataacacacgttcaatttctggttctttgtgagctactggtagatcctgaaactgaacaggctcaaccatggccccggggtattcagagctgagatttcaattaaatttgcagaagtgtcataataatacttttgaagagcacttcattttctctgacaagctgcatactggagaattgtacatttgtgatcaatagtggttttattcctcttcagatattttgtggggaagcaagtcatatattagagccctttggcaaagccatgactaaaaatgaagtgtcatcacttctgtgctttaaaaaatttattatgtaatatttgatagctgaaaaggagtatctgtaatacacatgtgtcaaaagcataacgacaacacaaacagcctaggtactgcctcccagcctaagaagcagagcgacttccatacccagggccttcctgcctcctccctgcatagcctgcccctggccgggaatgaccactgtcctgccccttatgttcatcacctcccttcttccttctctctctgagtggcttctattgcacatgtgtgtccctaggcaggtggcctggcctttgtatttgagcccctcctccagtgctgtccttttgcttgtgtcttttcttctaggtggggcctgtgtgtgctctcctgtttctacctgctccactgccaaacagtccctcagagctgactcttgtactcttccccaaaatatatgctttttaatgatgaagagatgggaattgtggtttttgtttactgcagccatttattttccctatcaacacctcaagtggtaaatcaatctgtacagaatatgtcatagtttaaagaactctcttcttatgggtatttaagtggttccacagtttttactattgtaaaaaccagtgcagtgaacatccttttgcatgtatctttgtgcttaacaaccagttattttccacaagataaatcccaatgggtgtgagtgctgggtcataacaagcatatacttagtgctttaaaatatgcattgccaaattgcattcccaaggcccaaatttatactcctatcaccaacataaaatattcctttcctcaaacccttgcaaaggctgagtattgtaattgtttagtccttatcagtttcatgaatcataagttatatcttattgtttgtatttgtatcaacttaattgctaatgaagttgagctcttcttttccacaagctcattaggcatttgcatttatttacaatttttaaattgattgtgaatctggattttggatccagataagcttgattatcttctcgtttgcattttatattttctcattcaagaattagttttggcatttgtataactcatttggcattgttacattacttaacataatttcctttattattctcaagaggctggaactcttttatgagtcatttattcatttattttttaaggatgggaatgatgttatattttctgaatatttgcgtgttttggaatgtcttggttgacatagaatatttgggtcaccatcttttactctcagactctgtggacattgtcctgtcctagtgtttggttgactgagttccttacttctcttcgtccattcctctgttgtcatgcagtcttttattcacccaacatatagtttgtcagtgtcttagcgtcctgcctgtccacttgcatttagtggtgtggaagggaaggttagtgcccttgttatggatctcctttcttaaatttccctgagggtcgatccttcccttatgtactgagcctttcgttagctgatgggatgaaggattgtagcccttctgtaatgttttttcatattgtcttttctgcatctgctccgctccctccttttacagttcctatcctacagatgactggatttcctgtgttgaatttccaagtttctgctttctgcttatcatcttttcctctgggtatcagaaaaatgacatgaactgatttttctgaatcattagtttggttttctgtagaacttgatctgttgttaaccacatccactgtgtgtgctttctttctccaatcaatttaagttgtttattaaagtattatgaacataattcaatatcacataatacctgaaggtgtataatgaaaaataacactctctgcctgttctccgccctcaatccttgtcctcttatccataagcaaccagcttgaacatattttaagcaatttctttatgtattttttctctatttctaaataatgaacttttgctatttcttgatttattaaaatttgacattattttttcatgctgctatacagatgaagactcaacactcttcactccctactactttccctctctccatcattgttatgtcattatttttaattgattcaataagcaatatttattgtctggactctgtaactgttatgcaccacaaagctgtgttatatcctataatctttgttgctgttgttcagccttttgcttttctgggagtgtgttcttctctttcttttctccttgaagccttggggaatgtacttctatttactcctcctgctcccaggccttcgctccagtgcccctctgtggagcccactctctggaagccttattagctcccatgtgggctacttgctgtcctggctgctgaatgcacgtcctgcccaaatttggtctccacctttctcccaggtcatgtctactgctcttctaggttccatgtcttcctctcttgttttattgttattttgtacaataattcttcactgttccaaatctgcttgcttggcatttatacaaggtatagaccaagtgggagaggaaaaatggttctctttttcttaagactctagtaaattgaagaaacattttgaatcacttaaagaacactgttagtttaaaatgctcatgaacagtgttctgttaccaattatgcattggaataccaacactgaaattgcttaagtatctccttaaactctgttacagttcatgattattaaccagacatgtgccgacagggtaatagatgttgactaaagtctaaagttgatgtagaatcaataggtgctgattacttttgccttctaatagcttacgacctacaaaatggtaagggtacacacaccaggagtacatggggggcatggccagtgcatctccttcagtggaaagggaaatggttacttctgtcctctctttgacgttttaccattagccccattaaaggaaaaacccaggatataggtgtggtgaagcaaaggcgacttcagcactgggagtgttagaagtgcagtcgataccttgttccccagtagggttagggaatggacagcaacataatacaaaaccctggctactagagtgtatcgtttgtcacacgtatggagtactggttttcaaagaattagcatatataataaaaatgtgacaagattatactcaaacttacttgatcattccttctcattccagcctctttaagtgccttgcagggtggggagtaatcctgaacatccgccatggccttccaatatgtagacacgtaaaccaatgtaagcgtctggttaagagagggccagataatgagttacacataacgaattctcatgttaacatgtggtttttttcaaagcatttaaaatgcttgtggtttaggtccccaagtgaaaggatttaggtatacaggtggtttgtttaggaggtccttccatgaaggaagtgaggactaggaagggaggccaagggaggaaagcctaaaagggcacgttaaccatcccaggtgtcctcagggggactgtgtgggacatatctcagttggctcagtgggcagaaggagggtggggttcttagcaccccatgtctcatttctcagtgactgaggaccacttctagaatccttaacttctggacacttctggcctgccctatactcaggccttgtgcccgcctgtggccacagggtgtccttaagcagaaaggggcaggtgctcaggtaggaggctgtggatttgcaggtcagttgtccatggaggctgcaggtgacctctgggctgggggacacagtgggctctggcagtgtctgtggtggggagctgacaaagaggttttgagggcagctacactgatagggaaacactcttgggctgacctctaacctctcccatcccactatggtctgaaacaagcaaccactagggcctgaaggctggaggtgttccaccatgtccccttgcagggaaggagtagaccaaagagacttagctaagtcagagtaataagaataatagaaaggcaactgaactgtccctcttcttatttttgcatacttaaaagggttctttcaaacaatggggaattagaaaatgaaattagcttgcatgatttcagatggggacagatgcctgtttgcttgattaaaaaaaattctacaaaaacctcaagcagagttaataatgtatgaaaattaggtaccatgtgtgcactttgcttcataatgtttttgttaagcaaccagttgatttaaaaataatgcaatgccaccactgacataatggcactctacacggtgtgttatggaaacatcctctcttaatattctgttgggttttccattacacaaggacatttttttaaaaagctttcagaattatcacataatatgaaattatatcaagctgcagtttgagaaaacaaattattcacatataaattccaattgtgttttaaacatgtttttatcagctagaggtaatgtacggatgtaggtctctatagatcttgtaaaatgccacgttagattcagactcctatcctcagatttttaccaataaatgacatttgctcactgcaggttgcctcctccttctttccccgtcctaccctctgccaccaggcctgtaagtagcaggaagaaacagggagaagccaaaggtcacagactcgtgggatttcagttcaagagatgtcccacttctgaagggaaagatgaatctctatacgaagttgacacatggtcattgggctggccagtggtgatgtcctctccctgagtttgagtgcaagtctccatcattctcatgataatccattcccgaagatgtctcatcttgctacaaagggcagtgggcttctcaggctactgtgccctttttgggctttattgcatctggacagtagtggtggaaagttgccttccagaagtttctgtggcctagcagagcacactgaggcatggtgaaattcagagaaacagcctaaaccatttttctgtgttccacagcatgcattactcttacattgtcttgaaattcttcattattcaactaagcaaataccaaatgacagctggttgtgtttatctccagggtgacagaatgatcacacagcatggtttaagtgacttgacaaaaatcagagcatttgttactggtggtagttgatggacactcagaaaggacagtgagcattgtggagataaatttctaaagctattgaaatgagttaatgggctaatggatgggggcatttacccttttgcctttaattcatgtcttgacttctgcggggtctggctgggcacgtcctctgcacagcatcctctggttccagccgttccccctgacatcagccgggccacaggagtgggcgagaatgctgagtaatccaccttgaggtatttttaaaagtaattgcagaggagatatttgatctttatgacttgcaccataagacttttttggaatctttgcaagggtttggttgtaacagaacttttccgtctacattatgatctataaaaatcatagtaactgactttgtgggatttgagttcttcttttgttattttctttgctttctaattagattttgctcgtatgcaggacagagtagtctggcagataataactagcattaaagtaactcaaagatagggccatacctggcattgtccagcaagaatggaaacagggtgtgctgtcctggacctgtggcagttacgagaagcccctgtgcaggtgtttgcgccacaaagaaccaggtcaactgaaggcttggccaggagtcctgagacctggtgctcctcccagcctgacagctgcctggaggtggcatgaggcgggctcttatttaactgacctcatctctattgtgttcagaagcaatcttcaaataataatatctgttcttgatttttcggaatgccaaaggggacaaattgattgtcacaatctaaggggtcatttatttactgagtgtgaagatggactttttaaagagcttaagatttcaagttatgtgcatgggccctttgaggatggaggtgctctttttgtaaattgtagactcaagacaaagaataagtcttgagttgagttgagttttgtgggacttatcacaaaagtaaactaggacatctatgagaagctgtaatttttcaccatcattccccaaaatcatgttggaagtaagtttaagacaccatcaccatctcactctagagcaccagtgtccaaccctttggatttaaggacttttttgcttctctgtggtggcagatatcatgaaaagtatgcacagactcttttttttcagtagttcatcaactatcattagtgtaagtgtatcttatgtgtggcccaagacaattcttcttcttccaatgtggctcagggaagccaaaaggttggacatccatactctagagtaatccttcctttcagggatttccgggcacctgtgttctgaaaggacttgcccataaatcagttttctagaaccccttcatggctaaatctagtgcttaatggcctggtaaacttgggtgttcctgagagagatatgggggtgatggcaacagcagacatcgtgttcctgtgggctaggttttaatccttcaagcctaggtaagtgctgctggttgcaggcagctcaccttgtctgattttcccctggagtgagtggaatcttcaggtggcctagagtccaactggacacaaagtgctcagctctccaatttgttcacaaaggtgcgccctctgcctcattagtgtccatgggagcctgaacttccttattcatttcatgttctgtgtcatcgtcaccctggatcatcccacagtgtgaagggatctgtctttcaaggtgcttcatgagtgatgctatgtgtgtgaaggaacagaggcaaatcgcaattccctgttgatctggtgctttgcacgactcagggcgtgtgcaccttgcagccaccccctctccttgccctgggcatatcatgtacagaaaaacagaccttgactggctgcccaagagcctctgtttttttcttcccagtggcctgctgcctgcttaagagacagataccccaactccgaaggcaagcccctcacctgccattgccaacacctatgccctctgagtgctggtgaagagttgttcagttttgctactcagctggcataaaagcttgagcctctgtgccctctgaggctattgcctggcctgatcttgcaaacaaaacctgtcctgtccattcatttcttcagtcattcatctgtggccacacgagccacatcactgtgtccatctcagctaatgggtggctcgggctcctgcccaatgcctgtgtccaagcctgccctgctgccttgccgtgccggtcctgtctgaagtctctgatgatgattttcactggtgttgcctcaactcctctgccactcccgacaataatgcttcagttctgcctagggtgcccctcattcggcccttccctcctgtcaccctactctcatctgggcctctgttcttctgcctttgcctgtgtggccctaacatccttgtcttcagtcatctctgtgtgttgctttctgctcagacacactgccctgccatgtgccatctgccacggtgtgcctgggagtgagtagacactcgggtgatgccagtccctggagtgcccctgccttctcacccccaaccaggacctgactcccactcccagcacagctttcgttggccctccccaaacttggggcttgcctgccctggagacccccccatactttggccacccagtggccccactaggatgtgcggatgctaactgcattcttaggccatcacctgagggcttggtcctgagtgtccatgtcccatttgctgggcttcccctgccttgggctgccttgggtcagcaggtgggcccgggtcagactctgctccctcactctgatctgcttctcccactgccactgacaggcacacagggccctttcctgaggccaagtgccagggacatcagagagccaacactaggcttgtgtcacttctgaggcttccccactctgctcttagccagccctattactggttgagttaaactgttgccggtaattgtatttgatcctctggcttcttcagccttcgggacagaaaaggatggacgaattgagtcctgcagcagcatgttgctaaaccaccaaggagctggaccaaggttaggaccagtttctctttaatttggcaaatggagatggctctgaggtccctttatgctttctacccatgaagacaagtgtgcggctacagagggcaacagcagaatggtgggggctcgaagcacccccaggttcctctgctttacccctaatacacatcaagtgcttagagcaggcctggcttcgtgtgagtggggattgccaattatttttccagtggacagtcagcctcaggaaggcagggctctgcttggttttctgctgtgtccttggcacctagagtaggtatagtcagtgcccaacagttaactgctaagtgaagttaatagattaagcaagagaggtcatgtggctccctgggaagaatgcggggtttggcgtctggaggcctgggtgtggtccccctcagccgctagcaggctgcaaaaccttaagcaagtcacatgaccttgctgggcgttgctgtcttgtttatgtccatgggcatgtggtgtaagattttgctttcaacttcaagtgccacaaacctacatgagggtggcttataacgtgagggtggcttaaacagtaaggagcctggttgcctcccctaaggggaaagctggttcagctggctcaactctgccggggctctccagagacttctgtgcacctctggatgtcccctcctcgttttgagagctgcaccattccgaagctccgtttcctcccctgactatggccaaggataggaaggaaggcagtgtttcctctcacctgtgtttattagggagggaagcctttttccaaagaccctctgcagtcccctcaggtcttgttggctatggtttgtgtcacatgccatgtgacaggagaaccagacattgccacctctgaagtaggagactcctgccagcagggagggaggaaggggctgggaagatgagtagctgcggtgtaggcagctggcagtggcttctctgtgggacattgatgatcattcaactactatcaggttattaagagcaaacaaggtcacataggtggaaatgctaagtggggatccctaacaggtgacacatatgcaccccatcaacattatggtccagatacatgtttgaaaagaaagtgcgaatgttcttaggtagcgcttgtcctctgcagtgtgtcctcaggccttaggtggagcttgtcctctgcagtgtggcctcaggccttaggtggagcttgtcctctgcagtgtgtcctaaggccttaggtggagcttgtcctctgcagtgtggcctcaggctccaccctgccatattgtcttactcttggccacttaactcattttgcttcctggctggtctctcaaggcatttaagtttgcaggccctgaaatcaggcattataagatcaatgttcaactagttcattcttagattgtgcaattagagcttgggcatcttaattaaaaagaaaaacgcttatgttttcagtggatttaatcatgaattgggtgagtctggatctgcatattccagtcccccctcttttggcacacgtgttcccaagcttcactgtgaaaggtgcaggctgaccacaggatcatcacctggcccctggtggtgtctgtgtgtccagggcagcttttggaaggctgggtttctctctaaggcgctaaagccagcatggtttggacagtctctcccttacaatgtgggctttcttgccagttgattaaaaacaagcaaacagacaaaaacccagaagtactctatttcagtgtttgtagattgtatgttcacagacctgtagtggtttatattctccttgacatgcatctcctcttaatttgaaagctgttgacattttgcttgagctcatatgcagtaccagtttcttttcttcttcttttttctcatttgtttccttaaaaaaaaaaatccagctgctttcttgctttgagatgtaaattccacattttggctgcattggattccaagttttcccagaaaaggcttaaatttattaggttagttcacaatgttctcacagagaacttgagtttgcggcatggagccatatgtggttgggttgttttaagataaatactgtaagagagtcagcattacatcactggcagaaatgtgggctgtgcctgtcatttaaatagttatcacatgtgatttaaaagctggctctcggtgggaggggatagggttggaggggaaggtcagatggatgtttctgcatctgtggtgtctgtgcctctgcctcagcacagagtcgaatgacactacgaggagctgagaagcctccagagggctgtgctaattggggttactccccatcgtcctctctggatctggttctcaatagcataaaagagtacaaagtgaagaacaggctgggtcacaaagaggcctttgcatgagattacttagcaagggggaggaggtttatttaattttgtgactgttgatattcacattttgttttttttttgttttgttttgttttgtttttaatctctgaagatgagaaacaaaactgagagggcatcttgctttttaaaaattgtactttctcagcatctaatttggacctgttcatgagtatttatatatgtgtgtatatgtgtatgcatctacacacaagtaagacatacaagtatgaacacatggatgcgaatataaaatgtcaattgctggcagcagaaggcagcttaccacaatttactgcagaacaccaatttcaagatatttggattttatgaatcaggaatatagaaaacaaaaagaaattggggagtctagcatggattgctaacttatgatttccaaaattgcttaattttttaaattatagtaaaatacacataaaacttaccatcttaaccattttaagtgtatagcttagtagtaatgggtatatccacattgcaaaaatccaaaatctgtttgcaagaaagggaatgagacagaaggagtcctgtatactgtccttatcatttcatcaaagaaagagcattttaataccagaagacagacgaaaggaaagaagcctgttattttagatgcaggaaattcctcctaacctgtggcagaatagtcaagagaaaaatatttttccatggaaaagtaatactacaaagaactatgtaacaagcagctctgtgtggccatttctcagattttaaaaatgctagctttttgtcatctttgctccagatcattcattcctacttaaagtgctgctgcatgaactgtttgttaccaggccatggcgaaacaaagaacaaaactgagacggcatcttactttttaaaactaaaattgtactttctcagcatctaacttggacctgttcatgagtatttatatatgtgtgtatatgtgtatgcacactcactgtcacccagactggagtgcagtggcgtgatctcggctcactgcaaccttcattttgggccagaatgaagtcagctacaccacagagctcacagttgagaagaaatctctcacaatactttgctgatgaaggaagctatgtactgatttacattctgacacgagcatcttactgttgctggtccaggtgtcacgtgcattttgtggagtgcactgattagtaactctgctctagatctggttttgttcttataaagttgatggttacagttgaagcctgtatatattcattccactaagatcccattatcctctttcccctccatgttaactagtgtattgaagttggcgtgtattcttccaggccatactgtatttgcatgagctcactagctatgtagagtattattttgtgttagtggaatcctactgtatatagccttctgaagctaaatttgttttgtataacatgattttcaagatttatctattttttttaattaaaaaaaattttttttgagacagtcttcctctgtcacccaggctggagtgcagtgacatgatctcaacttactgtaacctctgcttgctgggctcaagcgatcctcccgtctcagcctccccagtagctgggactacaggcatgtgccaccacgcctggctaacctttgtattttttttttttttttttttttgtagagacagggtctctctatgttgcccaggctggtctcaaactcctgagcccaagcagtcgcccaccttggtctcctaaagtgccgctattgcaggcatgagccaccacctctgaccaagacttggctattttgatatatgtagatctactgtacaatattgctttaggggaccagaccacattacacgtatctgtcctcctaatgttgatggacatttgggttgtttctaggtttttgcaaatacaaatgacactacagtccatgttctcagaagcccccactgtgcacacaagtggaaatttatccaggggagttttcggaggagagttgctgagtcaaaggtgaagtgatgtcttcattcacaaaatctaattagtatattaaccaaacttagctgtattctacagcttttcaggtaaatggggagtaggaaagaataagccaggggtcctcaacccccaggccagggaccggtactaatccctgtggcctgttaggaactagtctgcacagcaggaggtgagcagcctatgaacgagcattatcacctgagctccgcctcctgtcagatcagcagtggccttagattctcataggagcgggaaccccattgtgaactgtgcatgcgggggatctaggttgcaggcttcttatgagaatctcaccaatgtctgatgctctgagatggaacagtttcatcctgaaaccatcccctcttctgtcccccatctcacagaaaaattgtcttctataaaaccggtccctggtgccaaaaatgttggggaccactactataagtcaattattaataaatttgatttcctggacccaattgagagctactggttggttgttcatctctcgaagggttaactcaaagtctgttcatagtggaagaaatgatctggcagattgggggaagtgaatcctctttgtgtcttggatgtggggcagggaccagcagggagaagccagcccttcaataagtttccttctttttatgtaaactagaaaaagttcacagacttagtctgggagggagataaaactgggtattgctgtctcttgtgttttttggtctaagaaaattccgtggttcaaaacttggccggtcttctctgctgggtttctcagcaggctttcctgtagtggctgggctgctgctcagtgttagatgatggaagcttctttcagccatctagctgatgctttctttgaagaactattcagggaagaagtgggcccaggttccattcgagtgagacatcaggggcatgtcccctgctggcctggtgggagcctaagaaggctctagtggccagtgtcctgagtgttgccaccacgcagcctgcaagcaagtcagccttcagtctcaaatcaactggtaactgagacggtgttcagtgtgcttaatgcactttgtttcacagccttctctgtaatcttcagcaaagagtaatgtgttttgaacattctttagaaaacacgtggtgtggcatggtggctcacacctgtaatcacaacactttgggaggccgaggtgggtgggttgcttgagcccaggagttcaagaacagcttgggcaacatggtgaaactctgtttctacagaaaaattggcatgcacctgtagtcacagatacttgagaggttgaggtgggaggatcacttgaacccaggaggttgaggctgcagtgaactgtgaccgcaccactgtacttcagcctgggcaacagagtgagaccctgtctcaaaaaaaaaaaaaaaaaaaagaaaagaaaagaaaaaagaaaacaacaagtagaaggtaacttgatgagaaaaaaaactatcaaagaaaaaagtaagagatgaaaagccttcatatatggagctcttctaaggctgttgaagaaggctgtggcatgaccgctccctcatactgtgtgccaagttgaattatggttggggaaaagtctgagagtgattactcctatgactaatgatttgtttcagtgattcaggtgcctgttggaaaaacattctgtgtataatttggtatatctgaaccactgtgctctgccaggttatcagaaaaaaacttttcaatggttcccacctgggaagtcactggtgtgtgggatacacaggcatgtgtttgtgtttgtaaaatattcttttttatttttatttaatcagctgtcaaagctcgaaaaacagcagcagaggaaagaaaagaccagagctaagggaccttctgaatcaagcaaggaaagaaacactccccgaaaagaagaccgcagtgccagcagcggggctgagggcgacgtgtcctctgaacgggagccgtagctcaggaggcagaattcaggtaggagtttccctgcttggcttcatcttcccacattttggggaagcagcaatgaataggagggaatagctgctgaggctgaattcattcatttcacagcgttcatccatagcttccttaaatctgctgccttccaggatggagacaaaagttagtgtgttagtccgttttcacgctgctgataaagacatacctgagactgagtaatttataaagataaagaagtttaatggactcgcagttccacgtggctggggaggcctcacaatcatggttgaaggcaaaaggcatttcttacatggcggcaggcaagagagtataagggtcaagcactccagcctggtgacagagcaagactccatctcaaaaaaaaaaaacaaaaaacaagtgaaaggggtttccccttataaaaccatcagctcttgtgagacttgttcactaccaagagaacagtatgggggaaactgcccccatgattcagttacctcccaccaggcccctcatcttgaattgtagttcccataatttccacgtgtgtgttcctacgtgggaattatgggagctacaattcaagatgagatttgggtggggacacagccaaaccatatcagttagcaaataagattgtattttattcattgagatgcaggagggtggcataccacaggcctggggtgcccacctgggggtggaacctgtttgtgccaccttctctggctgcctgtgccagtccacagctgctgctgtgattgcctgtgcagaacactcactcaccgatacagaatccagatgcagatgcagagtccacttgcgctcctgcatctcccttcctgctcttagccactctagcaaagggcactgccatctcagcagcctactttcattgccacctgccccgtgttctgaaatccttcacagtgccccgtgtggcactgtgagtttacttttcctaaaatggcattttattcttattgtggctcactgtagcacggagtccacctccctgcctgaacatcagaggccttgaaaatgtgatgcggccatctgatggcactgtgcctagttcctcccaccagggaacctgtttattttgccaagcactggaccaaatactgggtgcagatttgagggacccaggacctgtcatggggaggtcacaggctcagggagaagcataggaacagttatactacagcacggtgcgtgtggcaggagtgtgaacaggtgtggggtggagatgggaggtcaggagaggcccctcagaggcctgggaccagatctggaaggacaggtggcagtggggaggcagatgaggggcaagggcaggggagagctgcctgagccaagagaagagcagtgcaaatgccatctggaggttggggggcaaggacaggagagtttgggaatggaggaattgcagaagggtgggagtgttgagtgccaagtggagtgggagggcagggagcatctctgaacttagagaaataggaggtctggattgtatagggtctggtatgcaaccctgaggaatttggattttatcctggggcgggagggacctctgaaaggttttaagtgtacaagtgacatcatcagatacaaagtttaaaaagagcactcacttgagcagctttggggagtgaggctggaagcagataggcccattaggaggtgattgcagaagtccagagaaaaaattatagtaggaacagaggggaaagagtgggattgaaagatgtaaaggaaatagaatcatttcaacgtggtgactgattagattggaagaggagacatccagaaggatgagggaggaagatgggggttgctgacggtacctattttgggtgtgttgtgtttgaggtgcctgttggcagccaatggtgatgccagtcgtctgctgagtctgtggctttagagctggggagccaggtctcggacatacaatttggagccttcagctcacagactgtggttaaaaccaagttaggagacagaattcacccaagagacaccaaattatgatagaagaacatccagaaggtggttttcagccttctctttctcttctgaaagagagcaagggtcagaagtgtacctatgaaatggcttttaggatccacaataccaggaagtgagatatattaggccaggtgtggtggcttacacctgtaatcctagcactttgggaggttgaagtgagagaatcactcgaacccaagagtttgagaccagcctgggcaacatggtgagacccccgtctcttaaaaaaaaaaattagctgagcatggtggtgcttgcctatcatcctagctactcagaaagctgaggtgggaggattgcttgagtttgggagttggaggctgcagtgagccatgattgcagcactgcactccagcctgggtgacagagtgagaccctgactcttaaaaataaaatttaaaaaagatacattagttgtaattgggcacagtggcaccagctcccaaatggatacacagacgagaggaacagaatggagagctcaggaagggtggattgttggttcatagacagttttaggggaggggactggacagtgagtcctgttgtcctcttaactgttccctcatcactgtgttttcctgctagtgttgtgcagggagacaacagcactgtggtgaccagccttggcttatgtatctcacgtatgcatgggacactgaagggtgcctcgaagggaagggacgtcacataaaacttccactcccacccctccaaaacttcatgataattcacttttgttagtggtcagttttggcatcacaaatattgctggtgcttctgatttatagtctgtccagaaatccttaatccaaagaggtgaaatgtgctaagtgaagacagggcacagagtggccctttaagatactttttcagttgtgctagttaaatgggtcaagcagtaattcagaaactcatcgaggtcttctttccatcctgctaacttttgggtgacagtgagtaagttctatggtttttcttctattggaggaaaactcatctccgtcagcagtgctttgtggaaggcaggcaggtagaagtcatggtgcctggaactggccccagcagcctgggcagggcgggggcaggcatgttccctccccgccatgtttctgtgttttctcaggcttctctggatcacagggaagcatgacagagagagcatcccagcgctgctcctgttccttgaatgaaaggtgcagggactgttactggttaggccaagttttagtaattacttggtccagaagcaaaactcagattggacactccagtttccactcctggggttcagggcagcttcccagccttaatgctcaggcatggcccatgtctcttcttccagttctgttgaagactgtacttaatagtctttcctgcagtgaattgggaccttaacaacaggttcaaaacaacttgggctgggcatggtggctcacgcctgtaatcccagcactttgggaggcccaggcaggcggatcacgaggtcaagagatcgagaccatctggccaatatggtgaaactccgtctctataaaaaatacaaaaaaaaaaaaaattagctgggcatggtgatgcgcacctgtagtctcagctactcagaaggctgaggcaggagaatctcttgaacccaggaggtggaggttgcagtgagccaagattgcgctactgcactccagcctggcgacagagtgagactccatctcaaaaacaaacaaacaaacgaacaaaacaaaacaaaaaaacaacttgaatgttcagactcccatcatgaacttaatgaacgggagagggagaaacatacaagcccctgtctcccagcaaccagacccagattatcaagctaaacacactggcacgcatacacacacacacacacacacacacaaatacaaattcacatgtgccttggaggtttgtattttcaaaacagcttaaaaaattcaaataccacctagctgattccttcctgggttgtattattaacctaatacattttataaatttaatgtcttgatttttgctttatatctgatcagtgctttgaaaatctttggtttaatctatgacggggtattgagttttgttacttttaaaattcatgcaaaacataacaacttaaagacttccatttgctttagatttggcctcagagtaattcctgtagagaatacaccatggatgttagtgttctgtggcccctgggtagcctgggagtaattctgctaattctgtgggcaagaaaaacacccgagggtctcatgggcagacaaggggacagttactgcatgtgtcacagaacatacaggagaacacgctcatagaaggagaactgagcacataaaaagaagggcaggaggagggtgtgaacatttcacatttttccccagtgtctaagtttacgaggggaattctcatggactcgtaggtatctacttcttgcttctctcacgttaatgacattttaataatgtatttatttccttctcacggtagtgcagattaggtagcatagaacttggggtcagtggtgctattgtgaatcacccaaatagggccagccacagaggggaggcagcagggggagcagaccccacgggaagtgtttggaaaggaggaggcagttgtgtttttccttccccttccctataagtcaagttcactgcagccatgccatcatggggcccttgggaagaggcaggcaaaagaggaggaagagggcaatggagggaagttcctggctggcctcagccttcaggttaggagactcagcgggaaggagcagagggacagatggaggggaagctgaaggcccctggcatgttctggctgtgctccaggctgggatccttggagtgggggaatgggggttgggttgcaggaaacttggaagccgtgacagggattctggagggagagcagtgcaggtggctccagggctccaggaggcagctgcagcccagtgaggtagcaagacacggtcaggcctcagggcctgtgagagtgctgctcagcatcgccgtggggtggggaaggctccagagggtgttctctgcctggtggagggtgtggaggaaagctgtgttgggtctgtgggctgactctcggtcctggatagaagtggtgaggtgagcctgctgcagaagccatgagggggcagcttcattaggaggttgggggtcatggcctcagctcttcatagcactgacagtccctccaggtctcagctgtgacctccactggcctcctggatgagacttgcaggggtctgtcattaatgacacctgagactgagtgagatatgctggtgagaactgagacgaggccaggtcagccagagagggccttgggtccctgagcaagagacaccaaacttcaagtagcccaccgtccctcagtggtgcagtgtcagggcccaggtgctgagctgcaccaaccaccctgccacagaggacactgaggacccagagtactgttgacattaaggtgaaatggagcctctgtctggtcaggaacgcccctattgctactcagcgcatggaggctcatgaacaagtttagatcggcccatgaaagacagaggccacgttttgtttataccgatgtatatggtactgtctgggttttggacaaagcgcacaaggaaaaccatttattgatggtttaccataggcatccagttgttcttctttacgtcagggtcagcagtgacggtgtcaggcatggacagatgtccaggcagggaggagtccttcagagccgcccacaactagccgaggaccagagcggggctgggtgctcctgcttccgagaatttagccatgttcctggatttgaagatcctaaacgggaccagaaccaagtgacagctggcattccaatgatatatttggggttttttgttgcccgtgggttttgttcccccttctgatgaaatttgtcatcccagtaggccacaaaatcaccaccaaatattcagatatctatgagagctggattaaatggtgacagacagaaggtgaccctgacatttgttttgttccccagaacaacagcagccccctcactatgaagggagtagcacttttcatttgcttttctttaaatacagaaagagccctagggaatctggcaggccctaaggggagcagctttgagtttccaaggcacgagagagaaagaaaaggcaaaagaaaattgaatgagaaactgcatgatcttgggcatatttttctttgaaaatgattcaaaagccttcatggttcagaggacatttccagggccttgacatttctctgtcacattgcaaatgttgcttcttattttaccaagtggacatgaaactgctaaaattaactgtgtttttgtcctctgtctcaatccttcgggctctctcaccttgctgggaggagttgaggttttctgtgaggatgcagctctattatttctcctttctggccactgctaaaggcactagggccacctctcactaaaatgatgtggtttctgatttgattgcagggtcaagtattacctcatttgagtattgacttagctgctgtaattagggtgtgagaggagtgtgctcctgactggcaccccacatttctgtcctcaaatggcaacacacttgaaaccaaacaagaaagtgttttggaagctgccatctgtttgctttttcaatgtgacctttgtctgaatagtaagatgtgtcctggctgagcacacttcttcctaatgagctacagcagccgtgtgtgtgtgtgtgtgtgtgggtgtgtgttttctgttgaaaaggtattcagtcccttttcactgttcttttcgccatacaaggtaggactcctttcattctctgagcttcactttgcttccctgtatcaacatttgtaccacattctcatgtccatgtgctggtatttcatggtataaaactagctgtgtctctgggtagtgtttttatctttttttaacttaaaacaatttttttagtggttgccctggagtttacaatatacatttttaactagtctaagtccaccttgaatgacactctaccactttacctgtaacaggcaccttataacaacagcatattcccagtgacattgctatcattcatttcactttacatatgtgatactcacctaatacattgtcactatcattaacttaaatagtctttttttttttttgaggtggagtctcattcactctgtcacccaggctggagtgcagtggtgcaatccctgctcactgcatcctccacctcccaggttcaagcgattcttgtgcctcagcctccctagtagctgagattaaaggcatgcaccaacatgcctggctaattttttgtattttttgtagagatagggttttaacatgttggccaggttgcttttgaactgctggccgcaagtgatccacacacctcagcctcccaaagtgctgggattacaggagtgagccaccatggccggcctttgtttttgaaggataattttgctggtatagacttctagacttgtagttttttttttttgttgttgttgttgttgttgttttaatttgcctttctttaaaaacacaaagagccctaggagcctcacagccctagaggagcagctttgagtttccaaggcatgagagaaaaagaaatatttaaatattttcaatacttaaatttttattcctctctctccttgtttgcagtttcttatgagaagtcccctgtaattctcattcttattgctctataggtaaggtgggttctccttaccccacccccagcccccagcttcttcaaaattttgtctttggttttccgcagtttggatatgacgtgcctaggtgtggttcttgcttggtattttctgagcttcttggatctgtgatttgatgtctgttattaagtttggaaagctcttggccattaatacttcaatacccctagcttcattcacaatttcctctctgttctctcttctccttttggtattccaattatatatatggtacatcttttgcaattgctctacagtcttggatagtctgttctttttttctcattctttttctctttgtttttggttgggaaagtttgtaatgacctatctttgagctcactgattcttccttggctgtgtccagtttattcatgagcccatcagaggcatccttcatttctgttacagtgtttctgatttctattatttccttttgtttctttcttggagtttccgtctctctgcttacattacctatctgttcttgcatattgtttactttttcattagagcccttaacatattaatcatagttttaaaaagttccctgtctgataattccaacatctgtatcatagtcccagtctgattctggggatctttttgggtccgctgaccttgaatctgtaactgtatggctttcagtacatttgggacattttaagtaatatctattcaaatatttttgtctgccccattcttcttcttacctggaggttactgttcccaaaccttaagtgtcattctggttttttattatccatgaggttggtttgcttcctcactgatgcagagtagcatgttatattactttactagtagtgggactggattttctctatgcccaggcttccacctccattaccttatttattagaaaataaattggccattaccttattgattagaaaataactggccatgattagtgattccatctattgctaaggtgcagagccaggcttacaaataatttagagtgtgccatctaatacagtagctactaactgcatgtggctattgagatgtaaattaaaattaaataaaatttaaaattcactttctcagtctcagtagccatatttcaagtgctcactagctacatacagctagtggctgctattctatcattgcagaaaattcaactaaacagcaccaacctgtagggatcaagttatgattttgatactgtcatctgaatcactttaagtactataagattgacattggctgggtgtggtggcttatgcctgtaatcccagcattttgggaggccgaggcgggtggatcacctgaggtcaggagttcaagatcagcctgcccaacatggtgaaaccccgtctctacaaaaaatacaaaaattagccaggtgtggtagtgtacgcctgtaatcctagctactcaggaggctgagacaggagaatcgcttgaaccaaggaggcagaggttgcagtgaactgagatcgcgccactgcactccagcctgggcaatgaagcgaaactctgtctcaaaaaaaaaaaaaaagacgttgatatataaataagtacaatatacatgagaaataatagatgggagaataagttaaagccaaaaaataaaagccaattgctgtcaaggtttgttcctaccactttcaggtaacatcaattttttctccatgcttgttttattgcattgcattaagctttccattcgtaattaggaaatcattcttttcatgttctatctgtgaagtcaggaccatcagctctcaagcaaaggaagagattccgattctggggatcttttgacacttcagtggagggagcttgctggaatctaacagtgctagaaggtcagagtgaagcctgcattgataacttcccagcatctctcatgttttttgcatagaacagccttacctttctaggtaaatgaattctgatttgattaccagctaagacctgaaataaataggtaaaaaaaaaaaatcttggtccttttaacagtgatgtggagaacagatctgtggcatgtgtgtgttttgtctagcacttgcatcctgtggttgcttaaatggcctgaagccagaagcaggtcagttggaagtcagtgtctttgagggtttcagtgtttacgtgggctgtgaagggtttcctttcttctggtcctggtctggcctcactggagatgttcctcactgtccctcgtggttgacggcagtaagagaactactacagcaggtggaggaaactggtggttcccctagcttctttcataagactatgaaattgtggtgctaagttatcaggcacctcttactactgcctgtcaggtgtccccagcctctgggtcatgtctgccctcagtagctcatgtgacgcacatgcgtttggaaatagacatcatcccttcagtagctcttagagggaggcacattaccccttatccagggtttctgaatttcaagcctcaatggtccacccttttctggagaaccatgtgtttagcttgaacaggacttctgctcagcacttctaatttggcagatggacctcacagatagctcactcccaccttcctcattcaagcttccagctatgtgagctgcgtggtctccagctactcccagttgatggccagtaacctggctcctgggttattctatagttcaagaaaataggaagagacatctttagcaagtgagactagaaatagagagcaacgtctattgaccaatccatgtattgtagtgggcggtggctttcagctggaacagtgtccactgctggccaaaaatctcttgcatgtagtttacaaatcactcatgatactaacattgatcttatgattaggccagcccattagtgttcccagtagtagcacagttaattctaaaggcatacctaatggattgtccttcaggttagatgctttataaagttcttatgcctaggaagtttacctaaaaactttaagaacccattggccaaaacctctcaggatcccttccagttctgtgtttctctagtagggaatagaaattcctaaatcatctttctcatataacatttcttttgaaagccattttttttattacaaagttaatgctcactcatagaaaatatcaaaaatgccaaaatacccgaagaagaaaataaaagtcatctgccaccttatcattctatgattattattatttttttattatactttaagttttaggtccatgtgcacaacgtgcaggtttgttacatatgtatacatgtgccatgttggtatgctgcaccgttaactcgtcatttaacattaggtatatctcctaatgctatccctcccctctcccccgaccccacaacaggccccagtgtgtgatgttccccttcctgtgtccatgtgttctcattgttcagttcccacctatgagtgagaacatgcggtgtttggttttttgtccttggcgatagtttgctgagaatgatggtttccagcttcatccgtgtccctacaaaggacatgaactcatcattttttatggttgcatagtattccatggtgtatatgtgccacattttcttaatccagtctatcattgttggacatttgggttggttccaagtctttactattgtgaatagtgccgcaataaacatacgtgtgcatatgtctttatagcagcatgttttataatcctttgggtatatacccagtaatgggatggctgggtcaaatggtatttctagttctagatccctgaggaatcgccacactgacttccacaatggttgaactagtttacagtcccaccaacagtgtaaaagtgttcctatttctccacatcctctccagcccctgtcgtttcctgacttttgaatgatcaccattctaactggtgtgagatggtatctcattgtggttttgatttgcatttctctgatggccagtgatgatgagcattttttcatgtgtcttttggctgcataaatgtcttcttttgagaagtgtctgttcatatccttcgcccactttttgatggggttgtttgttttttcttgtaaatttgtttaagttcattgtagattctggatattagccgtttctcagttgagtacactgcaaaaattttctcccactttgtaggttgcctgttcactctgatggtagtttcttttgctgtgcagaagctctttagtttaattagatcccatttgtcaattttggcttttgttgccattgcttttggtgttttagacatgaagtccttgcccatgcctatgtcctgaattgtattgcctaggttttcttctagggtttttatggttttatggctaacatttaagtctttaatccatcttgaattaattttgtataaggtataaggaagggatccagtttcagctttctacatatggctagccagttttcccagcaccatttattaaataggaaatcctttccccatttcttgtttttgtcagttttgtcaaagatcagatagttgtagatgtgtggaattatttctgaggactctgctctgttccattggtctatatctctgttttggtaccagtaccatgctgttttggttactgtagccttgtagtatagtttgaagtcaggtagtgtgatgcctccagctttgttcttttggcttaggattgacttggcaatgcgggctcttttttggttccatatgaactttaaagtagttttttccaattctgtgaagaaagtcattggtagcttgatggggatggcattgcatctataaataaccttgggcagtatggccattttcacaatattgattcttcctacccatgagcatggaatgttcttccatttgtttttatcctcttttatttcattgagcagtggtttgtagttctccttgaagaggtccttcacatcccttgtaagttggattcctaggtattttattctctttgaagcaattgtgaatgggagttcactcatgatttggctctctgtttgtctgttattggtgtataagaatgcttgtgatttttgcacattgattttgtatcctgagactttgctgaagttgcttatcagcttaaggagattttgggctgacatgatggggttttctagatatacaattcatgtcatctgcaaacagggacaatttgacttcctgttttcctaattgaataccctttatttccttctcttgcctgattgccctggccagaactttcaacactatgttgaataggagtggtgagagagggcatccctgtcttgtgtgagttttcaaagggagtgcttccagtttttgcccattcagtatgatattagctgtgggtttgtcatagatagctcttattattttgagatatgtcccatcaatacctaatttattgagcgtttttagcatgaagtgctgttgaattttgtcaaaggcctgttctgcatctattgagataatcatgtggtttttgtcgttggttctgtttatatgctggattatgtttactgatttgcatttgttgaaccagccttgcgtcccagggatgaagcccacttgatcgtggtggataagtttttgatgtgctgctggatttggtttgccagtattttattgaggatttttgcatcgatgttcatcagggatattggtctaaaattctcttttttggttgtgtctctgccagactttggtatcaggatgatgctggcctcataaaatgagttagggaggattccctctttttctattgattggaatagtttcagaaggaatggtaccagctcctccttgtacctctggtaggattcagctgtgaatccatctggtcctggactttttttggttggtaagctattaattattgcctcaatttcagagcctgttattggtctattcagagattcaacttcctcctggtttagtcttgggagggtgtatgtgtcgaggaatttatccatttcttctagattttctagtttatttgcatggaggtgtttatagtattctctgatggtagtttgtatttctgtggcatctgtggtgatatcccctttatcattttttattgcatctatttgattcttctcttttttcttctttattagtcttgctagcggtctatcaattttgttgatcttttcaaaaaaccagctcctggattcattgattttttgaagggttttttgtgtctctatttccttcagttctgctctgatcttagttatttcttgccttctgctagcttttgaatgtgtttgctcttgcttttctagttcttttaattgtgatgttagggtgtcaattttggatctttcctgctttgtcttgtgggcatttagtggtataaatttccctctacacactgctttgaatgtgtcccagagattctggtatgttgtgtctttgttctcgttggtttcaaagaacatctttacttctgccttcatttccttgtgtacccagcagtcattcaggagcaggttgttcagtttccatgtagttgagcggttttgagtgagtttctgaatcctgagttctagtttgattgcactgtggtctgagagacagtttgttgtaatttgttcttttacatttgctgaggagtgctttacttccaactatgtggtcaattttggaataggtgtggtgtggtgctgaaaagaacgtatatcctgttgatttggggtggagagttctgtagatgtctattaggtccacttggtgcagagctgagttcaattcctgtatatccttgttgactttctgtctcgttgatctgtctaacgttgacagtggggtgttaaagtctcccattattattgtgtggctttatgaatctgggtgcttctgtattgggtgcatatatatttaggatagttagctcttcttgttgaaatgatctctttaccattatgtaatggccttcttcgtctcttttgatctttgttggtttaaagtgtgttttatcagagactaggattgcaacccctgcctttttttgttttttcatttgcttggtagatcttcctccatccttttattttgagcatatgtgtgtctctgcacgtgagatgggtttcctgaatacagcacactgatgggtcttgactctttatccgatttgccagtctgtgtctttgaattggagcatttagcccattcacatttaacgttaatattgttatgtgtgaatttgatcctgtcattatgatgttagctggttattttgctcgttagttgatgcagtttcttcctagcctcgatggtctttacaatttggcatgtttttgcagtggctggtacctttgttcctttccatgtttagtgcttccttcaggagctcttttagggcaggcctggtggtgaccaatctctcagcatttgcttgtctgtaaagtattttatttctccttcacttaggaagcttagtttggctggatatgaaattctgagttgaaaattcttttctttaagaatgttgaatattggcccccactctcttctagcttgtagagtttctgccgagagatccgctgttagtctgatgggcttccctttgtgggtaacccaacctttctctctggctgcccttaacattttttccttcatttcaactttggtgaatctgacaattatgcgtcttggagttgctcttctcgagcagtatctttgtggcgttctctgtatttcctgaatgtgaatgttggcctgccttgctagattggggaagttctcctggataatatcctgcagcatgttttccaacttggttccattctccccgtcactttcaggtacaccaatcagatgtagatttggtcttttcacatagtcccatatttcttggaggttttgttcgtttctttttattcttttttctctaaacttctcttctcgcttcatttcattcatttgatcttccatcactgataccctttcttccagttgatcgaattggctattgaggcttatgcgttcgtcacatagttctcgtgtcgtggttttcagctccatcaggtcctttaaggacttctctgcattggttattctagttagccattcgtctaatcttttttcaaggtttttatcttctttgccatgggttcgaacttcctcctttagctcggagtggtttgatcatctgaagccttcttctctcaactcgtcaaagtcattctctgtccagctttgttccattgctggtgaggagctgcattcttttggaggaggagaggtgctctgatttttagaattttaagtttttctactctgtgttttcctcatctttatggttttatctacctttggtctttgatgatggtgacgtacagatagggttttggtgtggatgtcctttctgtttgtttgttttccttctaatagtcaggaccctcagctgcaggtctgttggagtttgctggaggtccactccagaccctgtttgcctggctatcagcagtggaggctgcagaacagtggatattggtgaacagcaaatgttgctgcctgatcgttcctctggaagttttgtctcagaggagtacccggccgtgtgaggtgttagtctgcccctacagtgcggtgcctcccagttaggctactcaggggtcagggacccacttgaggaggcagtctgtctgttctcagatctcaagctgcatgctgggagaaccactactctcttcaaagctgtcagacagggacatttaagtctgcagaggtttctgctgccttttgtttgtctgtgccctgtccccagaggtggagtctacagaggcaggcaggcctccttgagctgcggtgggctccacccagttcgagcttcccggccgctttgtttgcctactcaagcctcggcaatggtgggcgcccctcccccagccttgctgccaccttgcaatttgatctcagactgctgtgctagcaatgagcgaggctctgtgggcgtaggaccctcagagccatgcgcgggatataatctcctggtgtgccgtttgctaagaccattgcaaaagcgcattattagggtgggagtgacccgattttccaggtgctgtctatcacccctttccttggctaggaaagggaattccctggccccttgcgcttcccgggcgaggcgatgcctcgccctgctcggtgtgctgcagctactgtcctgcatccactgtccagcaatccccagtgagatgaaccctgtacctgagttggaaatgcagaaatcattcgtcttctgcgtggctcacactgggaggtgtagactggagctgttcctatttggccatcttggctccacctctgataattattattaacataatgctttggaatactttttctaaacaggtaattctacatctgtttctctaactttacaaagttggagacatactgtatatatatagtgtcacctgttttttatcttttaacagaatatctttaacatttctctaggtcattcttttactgtgagctttataatttccatctgcacatcaaatatttgaagactaaattatcccaatgcattaaaaatgtagaatattgtagaatatttaattgaagtaaatgtaaaagaaaaatacgttcaaccaggattccaaagctcatcttaagttcaaaaacaaagattttaatctgtgccaagaagatggagtttctcaaaggtcaatgtggggaacaattacagtatttcagttattggtattgaaggtagggaaacaagtatgaatagtccccaggtccgtaacttgggttaacatcatccacacaatgtaagaacaaatgggttgtttctaatagctaaaaactgaaagtaatatggtccccaggaatgatgttgtctgttctccacccactggttgtcttttagaaaactcttaggaaggtgtgcaggactcttacaggtgggtttgggtgtacgagggtagcccttggggatatggtggcagacagagctgcagagcatgggctagctgtggttccagcttgcctttctcatgtgtgcacagggacttcgctatccagctgggcaggggaatgagggctgttagtctatggaagcatctgcttgtgatacaaccctttcttaagaaggtggcctgcactgagtgtatcaggaagcacatccatggaggtggcactgccatggcatattgagtcgtattgaaatcttttgcttttactgaagtccatccaattagaatctagatctgagggaatagaaactcttctgttaggctttagctttagtttaacttttggatgacaaatgcatgcatcatagatctcggcaatactagctggtttttgttatagcctcggaattacaaaaggaaaccctgagacacttggacttctgtaccaaacagccaggcatcctttgagtagtatttaaaatgtcgcaagactaagcatttagtttattccctccctgtccctgcatttccttaagctcccatccctctacctccctcattgttaaaatgatttggaaatcatgcttttatatctcttttctaggaatttgttcatttcatctatgttgtctaatttgtgagtcgaaagttgcttgtgatatattccttttatctttttaatgtctgtaatgtctgtactgatgttgcctctttgattcctgatattgataatttgtgtcttctctcttttctgggtaagtctgaccagagacttatctattttattgatctttttatttttattttttctctcttgcctttttctgtttgaaatgtcatcagtttctgctccttattattctcttccttctctgcttgttttggatttactttgcttttattcttcaatttcttaaggtagaaacccagattattgatttgataacctttttcttttgtaatataagcatttaatgctgtgaatttccctctaagccctgccttaggtgaatataacaaattatgatatgttgtgttttcatttacttcaaagtattttctattttgcctggtgacttctctttgatgcaaaagccatttagaagtgtgttcagatatttgccttggtgtcttttgctctaagaatggagttttaatgaactggagactctttgaggagaaggtatttgggtttgtacatggcaacatggcaggtttttcagtgaagtgatgcactgatgctggtgtcactgtatgagcttgaaaacatatcttcagctgcttagttactcttatatgcctatgctaatagaatctgaaggcaaacattggaatccttcttaataacgtgtcttctttggtctttttagtgtgttatcattgggcagaactggatcctgaaaaattcaagatgctaagcacctacactactttaagaatttggaactgaaacatgaagaggaagacagaaataagaatttgggaacctgaatagctctgcaaaaaacaccaaaggaccgttttatcgttttctgttgttgctgtggtggagtgatgcagtgggcactgccggtgggccagggggcgggtgcgcatgtggtagaaggtgtgcgctcgtgcctcccccacagaaaggctttgttggtttctaccacatcttggcttgcttttggaacaggctggcccagcatcatttgtcatcaagtccactgtggtgtattctgcgtgtccatggcgggggttctccaatacactcacactgtccatgttctttttattgccagggcccgtgttgaagtgtcaagagagcaatcatcaatgataatgtattgtgtgagacctttgcatcttgtaaattttctcttttttctaaaaataaataataataaaatcctaaatctcaacaaaccactttattatcaaacaaattctgctctgtttctgcataacgatgatgtccatagaaatgcaatgcgtctgacctctctctatgcgtatctacacttcttttcacataagtctctcgcaagagggccttctctaactggcccacacaggctcctgagtccaggtgggagcctgtctagccagtttacaattgatgacatggtacttggaagtgagatgtcaggaaaagggagtgtgggtcagaagatagtccagtttcagaatggccacactgttctgagaccaagtgtggagccacatctggtgtatccagctttgggaggtggaggaaggcctcagcatggcgggtggtgcagataccctttatccagtagctacatggttgtccatgtatccaagtcaccacacccagcactctgggaagaaagaatcacattctgccaaagtaatttctcagttaaatttcagtctactggtggcacactcagagtagtcattttttgacatatgatttaatagctttatttatatatctaataacgctcgcatatatgctctctggaaaatatttttgtatatagaagagacatccttaattgtgatttttataatgctgaaactctgtcttctgtgacctctataataacttctgaatccatctagtctgacccagtcatctacttcaaatgataataaatcagaaaatgtggaaaacaaaaaagctcaaaacacatctcttggaatatagagttggaaaagggtctgccagactgctttgttctaaaccaattcagatggtccagtgtaattcacaatggtttaaacctctagatttgaagtcattacatcccagatgcagaccctggccagctccctaagctgtgtgggcagtgaggtcccagaagctctgctgtttgagttatctaagcagggttttacagagtgaattcaaattcactttaaagctacttgaacctacatgtcgataaactcagttgtagggtttggcttgctggataactgtcatgtttctccaccacagcattttattgccaccaattaatgcttattgaacagttgcagcctgtccttgtagtaaggggtaacgaggattgcatagagatacgacctaaggatcatgacatttggatggtggtaaaatgctaaaggcctttgttggtcacagcccagttcctggctcccattctaaagggacagagacataccagagagtgagcaccatgtggtcaagttgctgaagggtctgaaaccgtaaaggaagagctgaaggagctggggctgtttcatctgggaggggaactctaaatgtttgaaagatgtggaagagaagctgggtcaggaacaaaaataggagcaatgggtgtaagttgcatcaacgtagattctggcattctaacaacatgattcaaaagtggaaggtgatgttgggagcttttggtgtttgagcagaaattctgagcctatatgtgtgaggggggatctttgattaattaaaacatcttcctcacagtatgcaggaacatggtaaaagaaagcatttactacttttgtaaacattttggattgaagagaacttttccatcatcctgaaaatcactttcaactcctgggatcagagaaatagcagtgaatacaccgaagtctggcctaagagggtcagatctaaccacagggccagattatagagaaaaatgaaagctcaagaagaaaccccataatatctgcagctgcctcaaaaaggtggttaatttccacccccacctacactcctgaaggtcctttcctagttgctttgaaactaatggctaaaattagattttgggtggcattcttgtggagaataaatctctcagtctttacatctctcccaacatctctgcctccttctttctgcttatttataaagcatactgcttattgtccattaaaacatcatttgaatgaggatgggagaggagaatcgtaccatgtatggcttttctgagaagccttggcagatcacagacccaggactttaaacagagtgctgtgccgataacactgcatagcaggacccatttaatcttgcctttggtggtttactttacaggagaccaagctcttgtggctacacaaaacatagaccaaataaaggcatctttgggggctggatgtccatagcagcacctcatggttagtggtcccagggagggcattttctctaccaagcagtgtcctggctcagatgggtgccagctggcatatatatggacaatttggcatttcattgatttgatcataaggaacaaatagttccgcaaacaccctatttcctttgatatggtaacatttgagtaactccaaagccagagaggcaatcttttctatctctggtttgtcagattttctgccgtttttcagccaggcactttaagaattcttaatttgttgttcgttattgattcaggtcctttaaaaatagagttaaacaccctcatctcagaagacatggaataatatcaaaagtaaagccacccactggctgcatcagaaaagaagagggaggccgggcgcggtggctcacgcctgtaatcccagcactttgggaggccgaggcgggtggatcacgaggtcagtagatcaagaccatcctggctaacacagtgaaaccccgtctctactaaaaatacaaaaaattagccgggcgtggtggcgggtgccttagtcccagctactcgggaggctgaggcaggagaatggggtggacccgggaggtggagcttgcagtgagccgagatcacgccactgcgctgcagcatgggcgacagagcaagactgtcaaaaaaaaaaaaaaaaaaaaaaaaaaaaaaagaaagaaaaaaagaagagggaaagccctgtttccctgttttgaggtgagtctgtcttctgcagatgatgttttcattctctcctagggtacagacaccaacgtattaaatttttagaggttctaggaaacaaaaccttaaatttccattaggaaagtatctattagtgatggtattttaggtttgttaaatctaaattactatgttagttttgataatatgcttaatatttgtaggggccttaaaaataacttgtttttgaatgttccctgagggtggatgagttagaggctccatcactgagcaggaaacacattaggggtggtctgttgaagatgccgcagctgacagtcccctgcagcagagagacgggcttggacccaggccggggtctgaaaaggtggcctcccaagggagcagagttcagtaggaagagttggccaggtgacaggagggtatagaggagtgtgaaacaaccggcggagctgccacaggtgtgagaggaggggagtttcgacgtctgctggcaggtcggtaggactggacttggggagagagggagcacgtagaggaagagggacgtaaacaagacttcgtaagtgagcagggcctggaccgcagaggtcttgtaagtcatgataatgcgtttaggtcctatcatgccccacttcttgtcttctccaggctgatttgttctagttcttcagcagtttcttatgtgatatgactgtcaagcgaccctagagaacaggatgcagctctgccagtgtggtgtgatgaaggcccacgatgtggacagtggtgttgtggtctcgacaggccatggggttgcacagacttggggtcgaatcctggccttgctattgacctgctgcatggcctcaggacagtttattcaattattcagccttctatgcttctgttccctcatctgtccgaagaaggaagtgcttgccacttggagcatggtcgtaagggttaaaggaagaggaggctcaaagtcagcacagtgtgaacagtccccattcctgtggctgcatcacgtctctggctcccactaagcctgcgtctgcaggtcactgaacccccaggtttactccatgtaaccactgtcctccaccagtgaagaaccagaagaacttgatcttatgcctgttgggctaggcctgtggtctggtctattgaaatatttccagtgtcacgttggtgattcctctcagctttgagtcaaccttggacctgttttctctgtctttaagtcttggctaaacacagttcacaggatagagctggcactccatttggaatcctctttcagatcaataggtgcattacttcaattcccatcgaaccctcattcctccttcccatgttgcccattcttgctgaaatcaggccatactgttttcacagtattctgattaattcaacgatcctgtcaaaaaatattagttccgcacagtgcgttatttgtgaattcattctcagttccaatgatcactgtgttcttttccacaggctcatgagccatctgtttaatcatctattctagaatgattttaggagcccacatctaactgggctgtctgcagtgtctgggatccatcttgttgaaactgggattttttcacttgttcagttttctgtcccctctcttcagatttttttttttttttttttttttttgagaaggagtttcactcttgttgcccaggctggagtgcagtagcacactcaccgaaacctccacctcccagcttcaagtggttctcctacctcagcctccccagtagctggaattacaggcatgcagcaccatgcctggctaattttttgtatttttagtagagacggggtttctccatgttggtcaggctggtcttgaactcccaacctcaggtgatccgcccgccttggcctcccaaagtgctgggattacaggtgtgagccactgcgcccggcctcttcagaatatttttaaaagttgtcagtggtaactgccctatgtgcacatcttcaagttctctcagagcttttgaaacctgagttcattcagagtccctcgtaaggctatctcctcacctactgggctttgagtccccttttatgatgtttcttttgccttttttgagtttgaaacatttgcttacaagagttgatgaaataactaactgaatttgaacccgtagccatggccagaagctagtctaagacccgtacctgtgtcagctcttgtaatccccacatctctttcattattcccattttacagttgaggaagttgagatagagaaatgaagtcgctgtcaggaactgtgaagggtctggaatcttactctactaaccagtagacagttagtctgctgcagtatcctgggtgctggcaggagacaggagatgctgggccagggtcagggctgagctttattacaacaacagcaggatctagtgtcagcgtttatgccagctgcctaaccttaacttcaaaaggtgacaccttcacacacagtgggttgtgctacagaagaatcccaagtgtagagaatccaaatcttctgtctttgccctgagagagccactctctctcttccagggtggctgactatagaaacatccttggaaagagtcctagaacagaggtggccaataccacggctcaccagctatgaagaaacaatagagacccacagagaattgtctcccaaaaggaacttaaccaaaatcgctccgttaggaggtggtggtgtcaggattcaaagccaggccatccggtcccagagcctgttcttatagccctgctcccaccatgctgcccccaggacaactcagtgcaggaaggaggtgctgagctgtggcgccatgtctaactggtcaccagcggcttcacacaatgattattttacttgtgaatgtgcactgaacattgctctcatttgaatccctccccttctcaccactccagcctgctgaatcagaaactgagggtgcagccaagaaatctaggtatttactcatttatctttattttttgtgggtacatagtaggtatatatatttatggggtacatgagatattttgatacaggtatgtgatgcataataaccacatcagggtaaatggagtattcaccacctccagcatttattctttctttgtgttacaaacaacccaattatactcttttagttattttaaaatgcatactaaattattattgactgtagtcatgctgttgtgctatcaaatactaaatcttattcagtctaacttttttacccattagccatccccactaccttcccaaccattacttttcctagcctctggtaaccatcattgtactctctatctctataaggtcaattgttttaatttttttagctgccacaaataagtgagaacatgcaatgtttgtctttctctgcctggcttatttcacttaacataatgatggccagctccatccatgttttgcaaatgacgcgatctcattcttttgtatggctgaatatcactctattgtgtataagtaccacatattctttgtccattcacctgttggtagacgcaggttgcttctaaatcttgggtattgtgaatagtgctgcaataaacatgggagtgcaaatatctcttagatatactaatttcctttcttttgggtatgtacccagcagtgggattgctaggtcatgtggtagttctatttttagttttttgaggaacctccaaactgttctctgtactgattatactatttacattcccaccaacagtgtgtgagggtcctcttttctccacatccttgccagcatttgtaactgcctttcttttggataaaaaacatattaactttggtgagatgatatttcattttagctttgatttgcatatcttggatgatcaatgatgttgagatatgttccttctatacccagtttttttttagggatatttaattttatcaaatgctttttttttttagcatcaattgaaatgatgctgaaatgatcatatgaattttttgtccttcattctgtttctttgatgtattacattgattgatttgtatatattgaaccatccttgtatccctgggataaatcccacttgctcatgatgaatgatctgtttaatgtgttgttgaatttggtttgctagtatttggttgaggattttttgcattagtgttcatcgtgaatattggcctgttgttaaatttttttgatatgtctttgtctggttttggtatcagggtaatactggcctcacagaataattttgaaagtattccctcctctattttttggaatagtttgattaggattgatattagttttttaaatgtttggtaaaattcagtagtgaagtcattgggtcccaggcttttctttgctgagatactttttattatggcttttatttcattacttgttatttatctgttcaggttttggatttctttatggttcaatcttggtaggttgtatgtgtctaggaattcatccatttcttacaggttttccaatttattgatatatagttgttcatagtagcctctaataatcctttgaatttacgtggtatcagttgcaatgtctcctttttcatctcggattttatttatttgagtcttctatcttttttcttagttgggttaaaggtttgttgattttgtttatcttttcaaaaaatcaacttttccttttgttgatcttttgtattttttaaatttaaatttcatttatttctgctctgatttttatgatttcttttcttctaattttggattttgtttactcttgcttttctatttatttaagattcatcattaggttgtttatttgaagtttttctacttttttgatgtacatgcttattgtgacaaactttcctcttagtactgctttcactgtatcgcatagtttttggcatgttgcgtttccatcctcatttgtttcaagaaattcttaaattttgtgcttaatttctttgtggacccactggtcattgaggagcacattgtttaatttccatatgtttatatgatttccaaaattattgttgttattgatttgtagttttattccgttgtggccagagaagatatttgatataatttcaatgtttttcaatgttttaagacttgttttgtggtctaatatatggcttatccttgagaatgatccatgtgctgaggagaaaaatgtgcattctgcagccattggatgaaatgttctgtaaatatctattaggtccatttggtctatagttcagattaagtccaatttatctttgcagattttctgtctgggtgatctgtccaatgctgagagtggcgtgttgaagtcttcagctattaatgcatcgggatctgtctttctctttagctctaataatatttgctttacatatctgggtgcttcagtgttgggtgcatatatatatttagaattgttatgtctttttgctgaattgacctctttataaatatataataatgttctttgtctttttttatagttttggtcttgaactctattttttctcacatgagaacagctactcctgctctttttaagtttccatcggcatggaatacatttttccatccctttatttttagtctatgtgtgtctatagctgaagtgtgtttcttgtaggcaacagatagttggatcttgttttttaatccattcagctactctatgtatttttattggataatttagttcatttacattcaatgttattattgataagtaaggacttacttcttctattttgctatttgttttatgattgttttgtggtcttctctttcttctttccttctttccagtcgtccttttagtcaaggtgattttctcaggtgatgttttaatttcttgatttttatttttttgtgtatctgttgtatttttttttatttgaggttaccatgaggcttacgaataatatcttataacacattattttaaactgatgacaacttaatgctgattgcataaagcaaacaagcaaagggaaaaactaataaaatctctacactttaacttcatcccctcactttttaactttttgttgtttctatttatatcttattatactgtttatgtcttgaaaagttgttatttttgataggaccagttttagcctttctactcaagatatgagtagtttatataccacaattacaatattataatattctgtgtttctgtgtacttagtattaccagggagtttttttattggtttgttttcttttcttttacctttaaatgagttcttattggccattaatgtttttttctttcagattggaagactccctttagcatttcttgtaggacatgtctggtgttgatgaaatccctcagctttttcttttcttttctttttttggtctggggagcctttattttttctctatgtttgaaggataccttaactgggtatactattctagaatgaaagtttttatttcagccctttaaatatgtcatgccactctcctggcctgtaaggtttccactgagaagtctgctgccagacgtattggagcttttctgtatattatttgtttatttctcttgctgcttttaggattctttctttacccttgacctttggaagtctgattattaaatgtctttgggtagtcttttttgggttaaatcggcttggtgttctataaccttcttgtacttgaatactagcatctttctctaggtttggaaaattctctattattattcatttgaagaaacattctatccaaatttctctctctacttcctttctaaggtcaataactcttagatttgcccttttgaggctattttccagatcttgtaggcaggcttcattttaaaaaaattctttctgtttgtctcctctgtgtatcttcaaatagtctgtcatcaggctcactaattcttccgcttgatcaattctgctgtttatagactctgggctgggtgtggcagctcctgcctgtaatcctagcactttgggagggtggagcaagtggattgcttgagccaaggagtttgaaaccagcctgggcaacaaggcaaaaccctgtctctacaaaacaaacaacaacaaaaaattagcccactgtggtgcacacctgtagtctcagctactcaggaggctgagtggggaggatgacttgagcccaggaggtcaacgctgtagtgagccatgattgcaccactacaatcatgggtgacagagagagaccctgtctcaaaagagagagagagcctgggtgacagagcaagaccctgtctcaaaaaagagagaaagagagaggaagggagggagggagagagagagagagagagagagagagagagaaagtggctttgatgcattcttcagtatgtcaattgcatttttcagccccagaatttctgcttaattctttttaattatttcaatctctttgttcaatttatctgatgggattctgaattccttgtctgtgttatcttggatttcattgagcttcctcagaacagctgtttgaattctctgaaaggtcacatatctctgtatctccaggattaattgttcgtgccttatttattttcatttggtgaggtcatgttttcctggatggtcttgatgcttgtggatgtttgttggtggctaggcattaaagagttaggtattgatcatagtttttgtggtctgggcttgcttttaccctttcttcttgagaaggctttccaagtattcaaaggggcttgggtgttgtgatctaagtctttggtcactgcaaccatatctgctttagcggcaccccaaactcagtagtgctgtggctcttgcagacttatagaagtactgccttggttgtcttgggtaagatccaggagaattctttggattatcaggcagagacttttgttcttttttttttttgctttcccctaaacaaatggagtctctctcccagtgctgagctgcctggagctgggggtgggatgacacaagcaccgccgtgaccaccacaacagggactacactgggtcagacccaaagccagcacagcactgggtcttgcccaaggcctgctgtgaccactgcctggttactaccaatgttcacttagggccccagggactccacaatcagcaggtggcaaatccagccaggcttgtgtccctcacttcagagcaatgagttccccaagcctgggaccagcagacatgctgtctgggagctggggcctagagttggggaccttaggaatctacctggtgctctattctactgtggctgagctggcaccaaagcccaagacaaagtccttcccacctttctcttttctttcctcaagcagaggagtcttttcttatggccaccattaccacaggcccatggtaaatagtgtctggctattgctgatggtcactcaagacccaagggctctccagtcagtgtgtggtgaatgctgtcagtcctgagactctcctttcagggcagtgggcccccctctggcccagagcaggtccagaaattctgcctaagggcaaaggcctagaatcagcaggcccaggagcctacttggttctctactccactgtggtggagctgcaagaaaaactcccgtttgctcttgcctccttttctcaagctgaaataggctttcctcatagccaccacagttggcaatatgctgatttacacctgaagccagtatggctctgagtttcacccaaggcctgtggcgagtactgcctggctaccactgccaattattcagggttcaagggctctttagtcagcaggtcataaatcttgtcaagactgggtccttcccttgaaggtgtttaaggtctgggctgtgtctagaaatgtcatctgggagctagggcctggaatgcctattgccttatctactgtggctgagctggtgtccacgttgcaagacaaagtcctcctcactctcccctctcctctcctcaagcagagagaaggaatctctcctggagttagcttctctgcctggggttgagggaggacatgcaaatactccctcagctgttgcctccctaagtcatgtgcacaccaagtccactgactccaagcctagcacagcatcaagacttgcccaggaattgcagtccttgtggctcagactgcctttcaagtttatttagaacccggagcaatttagtccacagtagcgaggcttgctggaactcaggttccaaccgctgggatgggcgattctcctctggctagggctggtctaaaagctgtctccataaatgtcagctgattgctgcccagtgttgctttgcactgtgatagggcagcgctgagtttcaatgcaaagtgccataatcactgcactctccctcctctaagtgcacagattctctctccgcaccatgtggctactgccaggggatagaggacgggtgataaaggcaactcaagactgtctttcctaccctcttcagtgcctctttccttaatatgatgtttaaaccaggtattgtgatcatttacctgatttttggtttttatgaagatgactttttgtgtagatagttgttcaatttggtgttcctctgttgggtgtgtaaaaagtaaagtagaggttcctcttccaagactttcctccccatttaactagtaataaatagtgacttatcttagaagcaaaatttattcaaagacctgtgctaacatttttaaatatctgctagccgaaaaattacttctcttagaaggtcaaacaaagcaattaagttaaaacatattaaacaagtttgaagaggaattatgaaataaaaagagggggaattataaaaagtaaagtagagggtcctcttccaagactttcctccccatttaactaggaataaatagtgacttctcttagaagcaaaatttattcaaagacctgtgctaacatttttaaatatctgctagccgaaaaattacttctcttagaaggtcaaacaaagcaatttagttaaaacatattaaacaagtttgaagaggaattatgaaataaaaagagggggaattataaaaagtaaagtagagggtcctcttcaaagactttcctccccatttaattaggaataaatagtaacttctcttagaagcaaaatttattcaaagacctgtgctaacattcttaaatatctgctagctgtgataaataaatcgatgcactttatgttcttagctcccacaatttagcctaaatatgctggcatgcttattctgatccaagcaagcattagctcatagcctgttcctcttccttatttgaaggtgtttttacctttctcagcattccacaagttacttcctccttcctttgttctcctctgcctttgcctcttttaaaaagttctaagttgctagccaatcgggacaaatacagactgtgaggtcccgttccagccaatgaaaaccagacacagcagtagggtggatgcatcagattataaataacgctatctcctttgttcggtgtactctcgtggcaaaactgctggtgagtgtaccctttctgcagaaagtaaaaatggccttgatgagtaacttaaatttatgttcaagtgctatttctttatgctactggggaacaagcatttcaaacaggtgggggaacgattgctggagacttctatttggccatcttgctttgccccctctttccagaaatctaggtgttaacaagcctccagctaatagtaatgtgcctaaattttgagagccactgctttagtctattccgaataggagagtggcaagcatcacatgtctgagtctaccagtggtctcaatctaagctacatattacagccacctggggaagttttgaaaatcctggtgcccaggctgcatccaaagccagtgaaatttcgtaggtggctctgatgatcagctgaggctgagaaccacaggtgtactagattttacattgtgccttccaccttataaagctcttcgatcatgcccttcttccttaaagccataaggataatgcacatgggaacggtatcttgcatttgaaaatgctctagcagatgttacttttttttctggaacagatgtgtgccagagaagattcttcaccactgcacagatgaagccacctagaaggcaactgacttgctcaagatcaaagaaagtgactgggccatggctcaaaactaagaatcctgggactcactaatttgtttgttcattcattcatttattcaacagtctatattggcgactgtgctagtttctggacacatacggacaaatgtcactgagccctgacgaaaggatttacagtctgctgagaaaatggatggacagacagacacacagccacaacaatgtggagagtgcttacatacaggtggcaacaaggtctcctgagatgatccagcaagaattcccaagcctttggtggaagggatagctgaggagagtttccagggaagcttggttggtggtctgggacatgtaggagatgtccaggcaacaccagacagcttatatcaaggtgtacctagagaacaaacctggagaagcagagtgttctgagaatctcaaggaaggcctagtacccagacataatgccccattcaagaccttgcaagtctttttcatcgtagtcttattgtccattaacaggttattcagttacattggagcagtatctgagggcaaagccagcactccagaccctgcaccatttttggtggtattccagagaaaatgggatttggtctaggggtcttgtcttccttttctgggccaagcacagggataggctttgccttctctgtggtataataaatggggtagaacccaaggaaattgttggtgggggttgctcggtatgtgaagtgggaaactttatgccccagagctcagcattaccagaaccaggtctggcttccgtcctgtgcaagttattagaggcctgaccctttcaagccatttgacctctgcatctctcatatttgtacggcggctatgcctccctcattgggttgctgtgaggcttcaagacaataatttatgtgaacaggaacagcgagataccagctgcttcactgatgctgtcacagtggagggaagtagggggctggaagtggacgactgtgctcgctatggctgtgttctctccaaacccttgactccagacatgtgtttcactagctgtgggctgagggcagatcaggagtgagagagcatgagaggggcctgctgggactccctggccttgcaactctattcagtttttggttttctttctggcacacattgatgcaagtgttgctgctcaacaaggaaacagaaatacctcgtggataactgacggcaaataatgttctcctcacatttcttactacctcctgaagagggctgcttctgtatgaggacatggaaagaggaagccctccctgcccagaggtggatcccagagggagccaagcagtggctgtgctttgattggagagtgacgaccctgtgcataatcattgatccccccaactccggcacccatttggctccacctagagtggggtcaatttccttacacaggctgcttcagatgcccctctttccccaagatgatgatcacccattttagcaaactcaccactctgaaaatcagtccttattaacaagaataacagactgtattttggcattttggggtcaacaatatggaagagagtaaaaatatggagaaaaatctctggatatccaggaatgtaggattacaaactgctatgataaatgacttaaaagattactttaaagctttttatttgaaaacaatttcaaacttgcagaaaagtttcaagaatagtacaaaatatatcctgtgtactttattcagatttgcctattgctaacattttcctacatttattatttctttccaccccctttgcatatatacattttttcctgaacccattcaaggataaattaccttcatacttgagagtaatttacacatctcatggttacttacccctaaataccttaatgtgtatttcctaagattagggacctccttttacttaactattgcatgattgtcaacttcaggaagtttcatgttctttaatttattgtctgtaaggtgtgtaagaacagtaaaatgtgtgtttctttttttttagtaaaagggtatatgaaggcatggaaatgtaaacttttgctgagggttaaaggattgttttaagttagataaggaaagctgaaggttcaaaaaagtggtggaaaaattgtgaaaattaatcttacagaagaggttctctgtgtgaacatgttgactaaattcaaaagggttataaggtttttgcttctttaaaatttctgagtcgtgattttggcaaaataaataacttgtggtaatctgtaattcccaaaatcaaacttcattttcaaaattgtcttccctggcacctggcttttcaaatacttcagaaggcccccgaaatgtccagaaaagagaggtaaacaggattatttgacatgttcaggtacatgggattgccaaaatgatgctcaatcttctttaggttacatttttgtgaataatactaatatatattctgaaattttataggatttctaaaattctaatgtctaagtatatgttaccaattacaattatagttaagttattgtaaaccacagaaataactaaaaggcatacgccgtatatgactttgtaactttacttcatcctcttcatttacatagggtgtgccccaagtagagggtagttaaactcacgaaaactctgtaacagggcctttgagctcctacgctcaggcctgctcccacactgtggagtgtactttcattttcaataaaacccttcattccttccttgctttgtttgtgagttgtgtccaattctttgttcaagaagccaagaacctggacatcctccatcattaacatattgactatttcttgcagctggagtccatttccactccagtttgccctctgcacacgcatatacacaccccggccctgcacatgatgctgctgccactgctgccactcctaccagtgtttcatagctgctgtgtcttgtgctccgtttctttcctcatcaattgattgtctaacttagtggcttaaaatacaaccattaattatttctcacatttctgtgggttggcaatcttggtagtttttctgctggtctcatctgggtatacacacatgactgttgtcatcttatgattaagctgggctgaagagtccaagatgccctcactcacacatctggctgttggcgggatgcctcagttctctaaatggccgctaatcatccaggaggccagcatgggcttcctcacagcatggcagtctcaggtttccaagaagttgaagatggaagctacaaggtctcttaaggcctagactcatgaaaccacacacatcacttccatgatattttattggttaaaataatagacaaagccagcccatatgcaaggaggtacagaaataaactccaagggtgaagtcttgatgggagggagagcaatgcaatattgtaaatgggcatggactcatcaggggccattattataatgatctaccgtaccccatgatctggtgagcaagaattaaccaaaacatgccccaataggaaaaaagcaagcctctctcaactacagcactggcatgtcagctagtgatctttggtggcaaacaacagaaatagactgtagccaacttaaacagaacagccttccatgagaagggcgtcagaaagctcacaggcttggtggaggagttttgcaatgagacctcaaaagcatcaggaacagggcagctctgggggtggggagcagtctctgaagcagggattgatggacagccatttgaggggactaccatgggaacgactttatttttgctgacatttttttttttggtctttttgtcatttggctcaagattcagatttcttggggagcactggcctgacttgggacatgtttccagggcttcggtgggtaagtgggcaggaaacttgattgataggaccatgtggggtggggagaagggagcaccccaaaggagaagataggcactgtggcaaaaagtggaggaggtgctaggcaggcaacaatgcccactgtctcctgatgtccagcctgttcctgggggtgctcacttggatctctggggtctgatagtgatttaggagcgatcacctaaatctaactcaatgcctctgctttcacccgatgaatgaaaacaatcattaaaaaacatttttccctcctacatgcaaatgtaattttaggttaattttgtcacactggaccttttttttctcattaaacattgttttcatgggtcttaaaatcctgtgaccaatgtttggtcaaatagattctgattaataagtaccgattttaaaaactaataacttcaaaaaactgtcacacacacaaaaaaacaaatggtccacaaaacattctcctttccttctggatgttttatgatgcatttattgttaaccagtcttttactattaacttaaatgtccacttgaaacaaacagttctgagactttttccaccactgattaagactcgggtggcatgtattagggctaatattcatttggccttctgagatttctgggcagacttggtggccttgccagctcctgcaggcttcttgtccactgctttaatgacgtccacagcaactgtctgtatcacatcatcaacagcaaagggacccagaagaaaacggtcagagaagctctctacacacagaaccatatcaacaatggcggcatcacccgatttgaagaatttgggttcatcttccaccttctcaccagaatggtgaccaatcttctccatcagctcagcaaacttgcaagcaataagagccatgtgacaatccagcacagtggcacagccagtattgatttggccttgatggttcagggtaatcacctgagcagtgaagccagctgcttccattgatgggtcatttgtgctgtcaccaaccaggttgccacaataagcatatttgacagacatgttgttgacattgaagcccactgtgtccccaggaagagcttcactcaaagcttaatagtgcatttcagcagacttcagttgtgatgttgacttgagcaaaggtgcagtatccacgctaggcttgagagcaccagtctccatttggcccacaggggcagtattgataccaccaatattgtggacatccttgaagggcagacaaaagggcttgttagttggacaagttgatggtagaatgcaatccagagtttccagcagtatggttccacaggcatggccatttttacaggtgactttccattccttgagccaaggcatgtgagcacctgggtgcagccttctgtcaccattgccactgataattggcccaaatgcttctgtgtctgggctgtaggcaatttcttaatgtaggtgctgacttccttaataaattcctcatatctcttctggcgttaaggtggctcagtgaatccattttcttaacaccaacaattatttgtttcacactcagtgtgagccagaagggtgtgctcctgggtctgcccatcttggagataacaggtttagattcatcaatggaggcaacagtcaggacaggatagacagccccagatgttcccgtaatcatgtttctggtaaagactcagtgtcctggggcatcagtgatgatcacacaacatttgcaggtctccagttcccacagggagaggtgaatggtgatgcaacactcactctcagccctcagtttatgcaagacccaggctcacttgaaggaaccctttcccgtctgagcagccaccttctcaaattctctaaatgcctctttgtcgatctgcttaaactagagtctgttgtctgcaactaagaactctgcctgatatacacatcacacacacccccgctgccgagctgtaaatgttaaacaataggctctctgtggaaaaaaatgccctgtgccattttgcactcccaccagcagtataggagagttcaggctgctttgtgttcttgccagcatctgtttgccagcatgttattgatgttggtaaaagaaacaatgtaattaaaaaaaagttccaatatcatagtgtgattttgggttgtggggcaaaatattaacacacctttctattcctctgtcactgtttttactattaaagaaaagcacacttatttcagcctaatacctcccatttgttgacccatatagtcacaaatggagaatttgaggaagtctaccccttgaaatattgtttcattgaaaccagagaaatgtttgaaaatgtatagacacagcttctctaattgttcctgtgctctctgcagcggcatgagcacatggtgggcacagctgtcccaccactggtccagggtaaatcactttatctccctgggttgtcctacgaatgggaaagagattatgaataaagtgaatcaggtatagcagttcaacttcaggatcagtctgtaatttaaggtcattttcatgttggattaggaagcatattcaaagacaagaggcttatggttagtagctaattaacggccttgatggaattcttaacaattcaggatattgtgctgatttgaagccgttgccagctccctctgttaataagctgtgctctgttccccctcatctctgactcccagagtctgctgcagagctagataaggatttcagcctgcatgcccatcagggcccaacttgctgggggctggaatctgacctcaggatcctcaacttcagtttttcatctacagggaatttttcttgtcttaccttccaaggcaatgttctcagcacatgatacttgacatccagagaaatccttgttatcagtgtcagagtcttttaataagagactgggcccaatttgtgctcactggtgtgtgagaagaagaccgagagcgaggtgggtgaaggggaggcagcagagcagtggtgagctcacgcattccaaagaaccaaataaatgattctggataatctgccatttcagtattgccttttctcccctctttagtgcagatggcatgggactgtactagatcaggtggtgagaggaggacaagcacctactgaactgctcaggctgaaacatctcatcccctctgcctctttaaaagtaaacgtaggaattgcattcactctattgtaatccaattttgaagcttctagaaataggaattttgttgccaggcctcagtagaagtaattcccttccctaacaatcacgaaggaattaaaacagcatgcaatggggctggtgaagtgtgtccttgtaaaatattagacttggcttgttgtctggttttaactaatatgccaaactataggtgtggatataacttatttctggattccatgatggttattttattggatgttttctcatttgtgtatctgaattctgaagtgacagagacccaatttccctttgattctcctccccacccaaggtttgacccagtgtatcagttagcttctgctatgtaatgaaccactccaaaagtcagtggcttagaatgacatacatttttttaaatggactgtactttttagagaagttttaagttcatggaaaaatagtgcagaaagtaaaaagagctcttacacatcctctgcccccacacatctgcagtttccctgactaacattccaacaccagagtgatacatttgttacgattgataaacctacattgatacaccaagatcaaccaaaatctacagtttaccatagcgttcactcttggtgtcctatattctatgtggttggggcaaatgtacgatgacttgtgttcaccattacagtatcatgtagattggttcactgccctaaaaatcctctgctctgcctatttatccttccctcctcctaacccctgataaccactgattaccactgatcattttactgtcccccaattttgccttttctagaatatcatatatttggtatcctacagtatgtagccttttcagactggcttatttcacttagtaatatgcagctaagtttcttctatggctcgatagctcacttttttttaagcattgaatattccattatctggatgtaccatgatttatccacatactgaaggacatcttggttgcttccagttttggcaattatgaataaagctgtattagcccattttcatgttgctgataaagacatacccaagactgggcaatttacaaaagaaaggtttaattggacttacagttccacatggctggagagggttcacaatcatggtggaaggcaggaggagcaagtcacatcttacgtgaatggtggcaggcaaaacaaaagagcttgtacagagaaactcccgttttttaaaatcatcagatctcatgagacccattcactatcatgagaacagcataggaaagacccatccccatgattcagtcatttcctaccaggtccctcccacatgtgagaattatgggagctacaagatgagatttgggtagggacacagagccaaaccatatcattccacccctggcccctcccagtctcatatcttcacatttcaaaaccagtcatgccttcccaacagtcccccaaagtctcaactcatttcatcattaactcaaaagtccacagtccaacatcttctgtgagacaaggcaagtccctttcacctgtgagtctgtaaaatcaaaagcaagttagttatttcctagatacagtgggggtacagccattgggtaaatacagtcattccaaatgggagaaattggccaaaacaaaggggttacaggccccatgcaagtccgaaatccagcaaggcagtcaaatcttaaagttccaaaatgatctcctttgactccatctctcacatctaggccatgctgatgtatgaggtgggttcccatggttttgggtagctttgctcctgtaccacagggtacagcctccctcgtggttgctttcatgggctggcgttgagtgtctgcagcttttccaggtgcacggtgcaagttgttggtggatctaccattctggaatctggaggatggtggccttcttctcacagttccaataggcagtgccccagtggggactctgtgtgggggccccacatttcccttccacactggcctagcaggggttcccatgggtgccccactctgcagcagactcctgactggacatccaggcatttccatacctcctctgaaacctaggtggaggttcccaaacctcaatccttgacttctgtgcactcccaggttcaacaccatgtggaagctgccaaggcttggggcttgcaccctctgaagccatggctggagcggctgagaggtagggcaccaagtccctaggctgcacacagaatgggaaccctgggcctttggaaaccattttttccccctaggtctctgggcctttgatggaagaggctgctgtgaagacctctgacatgccctggagacattttctccattgtcttggggattaacatttggctcctcgttattaggtaaatttctgcagctggcttgaatttctcttcagaaaatgggattttattttctattgcattgccagactgcaaatttcccaaacttttatgttctgtttcccttttgaaactgagtgcctttaacagcacccaagtcacctcacgaatgcattactgcttagaaatttcctccgccagataccctaaatcatctctctcaagtttaaagttccacaagtctctagggcaggggcaaaatgctgccagtctcttttctaaagcataacaagagtcatcttttctccatttcccaacaagttcctcatctccctctgagaccacctcagcctggtccttattgttcattcaccttattgttcattcatatcaccatcagcatttttgtcaaagccattcaacaggtctctaggaagttccaaactttcccacatttttctgtcttcttctgagccctccaaactgttccatcctctgcctgttacccagttccaaagttacttccacatttttgatgatattttcagcaacatcccactctactggtaccaatttactgtattagtccacatttactctgctgataaagacatatccaagactgggcaatttacaaaagaaagagatttaattggatttacagttccacatggctggggaggcctcacaatcatggcagaaggcaaggaggagcaagtcacatcttatgtggatggcagcaggcaaaataaaagagcttgtgcagataaattcctgttatttaaaaccatcagatcttgtgagacccactcactatcacaagaacaagacaggaaagacctgcccctatgattcaatcacctcccacctggtccctcccacaacatgtgggaattatgggagctatgcagtctatgcatgtctatgcatgctaacaaaattactcttgtaccccataaatttatacaaatacaagatgagatttctgtggggacacagagccaaaccatatcaaaaactgctgtgaatatccatgtgcaggtttttgtgtgtacataagttttcaacttttttgggtaagtgctaaggagcaaaacttctggatcatataataatagcatatttagtgttgtaagaaacagccaaagtagctgttttccaaagtagctgcactattttgcatttccatcttcagtgagtgagagttcctgttgctccacatcctcaccagcatttgttgttgtcagtgtcttcgatttctgccattctaatagatgcatagtggcaacactcattttttactttttaagattctgttggttgttcaggtggcccttctcatctgaacttctcaggcgggatgccatggtcttggatgatcttaattctattactggggctttggctggaacgattgtggcctcattccatgtgatctctcatcctccagcaggctagaccaggcttcttcacatgatggtggaagggttccctgtagcaagagggtatgtccaagtagaaagcatttttcaagctgctgtttggcttgtttgctacatgaaaaaaaatgcaagtcacacatctaggcctaaattgaagagatagagaagaggtggattctatttcttcatggaaggatttgctctattttccccttctatagcaattggcgactgtgatgtctaactcagcacagagataacctctgacattacatccagtcactctaaatccccatctaagggggcacccataacattagagattacttggtgggtacaatgtatgttatttgagtgatgggtacactgacaaccctgacttcaccactatgcagtctatgcatgtaacaaaattacacttgtaccctgtaaatttatacaaatacaaattaaaatagacaaataaaaacagcttctttagttaatacagggaaatattatagaaaggagattaattaattctgcttttctaattattcagttggtcttgttcctaggaggcagtcatcatcccctaaaaccccagctgtaggagctcataatctttggtcttaatgttctataaaataaaagcaatacatttactcttgcctgcatttcttaactgctaaacaagaagcttttgaggtttaagggcttacaattaattgtacttctttgccttccatctttagaatcagttgagaaacagatacaagcaatgggaattaaacatcaaaatgatacctctatcgctgacagcattggtccagagaaagcagcttggggtacagccagacagggctcctgcttcttcccataaggacagacttgggatgctccatgggagaggagcctgggtctgcagagcaggtccactggcctggccagaaaaaaagaaagttgttgcttctcaccttccagattatggcagtcaagacagagggatcagggaagggctcaggaacagggagaaaagaggccatcaggctgtgtgtgagtatggctccttctcccacctcttcaccagtcagctacagccctgccctttccaggggaggagtgaggagtgaaaggatgaaaaaattaagtggaagttttttccaaatactttctattttgactttcggggcaatttttctatatgcatattgtgttaacttcttgttgaaggaaaatacacagaggagagcactcaacatgagcagacaactcagcacattttcgcaaatggcagacacttgtgtaaccagcacccggaataacaactgaggcattaccagccccctagaagctgtatgggttctttttgtgtctgacttcttttgctcaaaatgatgattgtgaggttcacccatgttgtgtgtagatgtgaccggttaattctcgttgctgtatagtattccactctgtgaatacattgcaatttacccattctactgttgacgggtaaactgcatcaacagtagagtggaatgctctgtgaatacatctagaaaccatgtctagtttctagatttgactgattaaaacattctgatatgtgtcttttgtgaaaatatgcaggtatttctgttaggcatatccctagaactatcctttagaacccagaagttccacttatagagatacatgcacaaaagatgcttagcaattttagatactaaaaaccgttttccaaagtggaaccgtgttgtactcccactggcagcattatgagaattccagatgcccacctccttgtctcccaatattttgaaaagggaagaagttcttgttctatagataagtaaaataccgagagagagagagagagagagagagagagagagagagagagagaataagtcccccataatagaaaaaggaagaattttccgaataatttttaaaaagaattttaaaaaatgcatcaatccatcttattttttgatacagttcaaaataagttgcagacaattattaataacagacggggactttttaggtgcaatacctccttacaagcagaagagtgattcatgatctaactttagaaacttgagatgctctcaaaatctcatccagctccgtggaggaaggattctgcagacaagatgttccctccacagaaattgtgataaagcaccaattagtgactacagcaaagaagtgggagtgtttaaccttttgggtgcaccaacaatgtgctccttaatttgaaaatagggtacaaagtgttagcaagtgaagaagagtaatcgttcatcactcaacttgacatatctcctttgcagcagaggcaggagaagggatcctctctgctccatttattttggctttcatctaacttctctgagaaaggaccagatgctctaatgaggggtaccagacactgaaaatatctggagatcaggataaaacacgctgacagctttccccttgagaagcctaccttccctccaagctccttagagcattttatatgcattacccagcagcaagtcttattatcctttttttgcaaatggtagaaaagtgatgcagggaggctgagctgaaaaagctcacttgaggataccagggaagccaaatgttcagctcaaaatagaaaccgagaactctgggaaactcagacagcatgagaaggtcctttcatctctggacccttctgtatctttttagacaataagcctttccctgaaagaatttttccccctaatgacagggctgccaactctccctccaggatgttgtaaaaaggtgacatttaactgaggaaatggaaactctaattgacttctcctaaagcagaaaaataagtggcctgtattccttctcttggccagatgtttgtaattgtccccttgggattctaccttgggggaagctgaaagaggcaaaacaaaattgtccacttgaattggtctacttacacccacaagaattgtttttacttcgtggtggaagatgtggagagcccatccaagaagacagcaatttcaggaagaggattccagctcatgtcactagctgccagccccagaatctcttgcagtgataaataaggagcttgaggtgaacactccatttttagatctggatatttggaggcctgtgcttatttgaaccagttgtgttccttgctttggataaaggaattttagcagagatgatgtgagcaaaatcttgaaatgtgcttgtgtaggatgtcttgccctcttgtgttgcagtcatcatcatgagaagaacatgccccagggagtctgtgggtccaagaaggatggaccagctgagctcagcctacatgggccaaccactagccactctgaaaacatgtaatcaagaaataattgtttactattgtgagccactcagatcaccactgagttttgtggtggtctgttatgcagcacattatgttataatggacaaatatagggctattaagagtagaataagtagaggaggattcttagcgtgctgtggacaatgcttgcaaaagtgcttggcttagggtagtcacatagcaagcacctagtaactatgagagaaatggagctcatcaggttgattgtatatcatataatttaaaggttagagtgaatcacattaaatattctgaatgtctggactgtctgttgatatcttcctattaactgacagtaacttttctctctctttttttttttgagacggagtctcgctctgtcgcccaggctggagtgcagtggcctgatctcagctcactgcaagctccgcctcccaggttcacgccattctcctgcctcagcctcccaagtagctgggaccacaggtgcccgccaccgtgcccagctaattttttgtattttttctttttttttagtagagacggggtttcaccgtgttagccaggatggtctcgttctcctgacctcctgatccgcccaccttggccttccaaagtgctgggattacaggcatgagccactgtgcccggccacttttctctctttttttgtatccttttcccatgacttctttactatctcttccccaatcagtatttcggtatctatctatgactatctatctatgacatccatctgtctatgactcagacctgggctgaactatatactcgccacatagattctgcaattaatattctgctgtatttgttttatgtatatgtctacctacgcttgtatacatccatcaatccatcttattttttgatgcttttcaaataagtggcagacatcagtgctcttcacccctatggtgaattttgacaaatgcatacactcattatccctgaaggtgtccttaggcccctttccagttaagtctacccccaactcccaaggtgaactctattctgatttttttcccaccatagattagttttgcctgttttagaacttcatataaatgaaattgtacatggtgtaatcttttgtgtccagcttctttcattagcaaaatattttcaagtacctgtgttgttataagggtcctcattttaaaacgaataatttgacaagatctttgcaaactgatctttactttaaaattttggacttctctgatgtgtatgtaaatacagtaaccacctttaaattaaatagcctaaatacagtaaccacttgaactaagcctctgaaacagacatctctcccatgtgtctgtcagaccttgtctttctgttttcatgctccccacatccccctaccttgtttagcattgataaacatttcaaaactgcagagggaatttatcatatttgtctcaagggcacagcgcttttgatttactgtgttcagtaagatgcagggggctaaccaacctcttaggattaactgcatttgacttaccttcaaaaggtcatcagcagtacatccttagtaggcctcacaatagtgtgtccacaatacgggttagtgggagtgattgaaaggcttggagagttgtccttctgggtttgctctggttgggcgatcagagtccatagcactgggtgggaaaacatgaaagaaaataagtgaaagtgacatgttcctccagaatagctaaaggtcagcgctcaccccattcaaccactgtattccctagacttagcatgaggcggtttctaaaaatcaaagccacacttagcgtggtaatgtggctttgtaccatgtcaacctagctaagcgggaactacgtttcccagaattccttgcctgtaggtttccggggttagcacacgccacgtgacctgatgcgggcttcgtgaggcggaagtgacgcagtgttgtcgtctcgtaggcttgaaaggtaggtgcccgacattagggactgtcgcagcccggggaattgtccccatctgctggcttaccttgtgggcgtggatcccctctaactttcctaattcccgggcggcccgcgggcctgcggcagattcagctctcaggactccactttcagtttcttccacttctggggcaggctgcttgtcctgccactctcaggccccccaccagacacggcagcaacagctgttcctaagtgttcaactcgctccttcccgcaaatgtagaagctcaaatccctatagcaaattccatattctatgtcattcttaatgcttccgtctctctggttgaatctagattggatacaatcagtgatgcacatttaccagacagaggatgtgcagcgtttactgttgatttctctcttttcctccctatcacctcagtttagttccaggatccacactcctccaccatagtcaggagattcagggaaagttggcagggttcagctttcaagttgacccttgatgaaccatggtcaatcctgttaagaggcgtgaaagccaatcccagccaatgagactggggagaaatcactgaagaacttgtggaaaacagaccctctggataaaagacacgtgtggggaaaaaggggctttttaatgttattctggatgtttcccaaaagtactgctgctgccttgcctccctgacagacactggccttaggatgacatgcggcaggaaggaaggacggatctggggtttttcaagactcactgagatgcacaaggaaccaaccctcaagtagccaactcgttcctgtttgcatgtgtcgactgaaaagaatcaaaataaacaaaatataactatttctaagaggttacaacttgcaggcaggaagcaggcctctacctgaggccataaagcatactttgaaggagaaaaggtaggtatttatgctaggtggagaggtaggatatacgtattctgtagcatacaggagaagcctatgaaaattcatggaggaaactcgttagagacacgcactgggcttacatatgaagaatatccaaaagcggatgacctgtgttcactctggggtgaagatttaacatttaaatgtattataattaggctgtaaatgcaaaaaggtgaaacatagggcacaagttcacgatctgtgcaatctccagagaccagtctgatctagcctgcagctggcagtcatctgtcaagaaggggctctttgtagcccagagtagctgtcaggttggaaccataaaaccaaaaggagggcatcggcggttaggtgaagaaaagaagtcttttggccttttttcctcttcaagtcagcttttgataagatctagtaataataaggggatgggtgtggctgcaggtgggacatgtcggttctctgtcctgtcacagctaagaactaagaactttagagtctttcagccatagagggtcctgtcatccattgaagggatcagtccattgggattttgccagttttagcattgatgctgtgtcctgggaaacccctgaatacttatcatagcagaagttcagccactgtagccctacctcaggaccgcttttatgggaaagaataattcctttaactgcttgagccatttgagttgtggctgcttttggtacttgtaataaattgaaagcatcttgaatgttctgggacagtaaaagaatgtgcctttgtttctgacagcaattataaaatcaattatatgtttatattctaaaaaatgttttgagtaatgctgacatcattggaaaagtgcatcacttagaaaatgtatctgtgtgtcaattttgtttgttcaaaatcagtttcattaatttgtgggaagatacaccttgtacattttacctaattaaaaaaaatattgccagttgagtatacttgtgatatattcaaagataaataaactttttcaattttagatattcatatgtctttgggcctttgtttagttttgtcctaaaataggaatgcttttatatgggccagattcctgcagtgatgatatctgggaaggaagggagggcatgatctttgttctatgtgtttaaaagtctcaaatgagttactgggatgtaaaaaatatattcgcacatgagtttggtacagttcggtgatttttttttttttttttgaaagaaagaaaggtttccaaggcttgacactgtcctgtgggtgtggtcaattaattgcattattggtcccgactctttacacctaccctttgccatgtagcctggtagtggcctctcactatgacactaggatttcccatgtgatgttctttggccaataggtgcaagcaaaggtttgaagagcactggggagttgggattgtttgctcatatctctgctttcatgatgacagtgtgccttggttagcctggggagaatgagtgtcacatggtccaagcaccactattgccacagctgatgataagtcagataactgccagatttaagtgggcccagaggagaccagaagaatcacccagctgaacccagcctaaattgctgacacattaactcatgagctaaataaatgcttattgctttaagccactaagttccggggaggtttgttgtgtagcattattgtggcaattcataaccaagacatctttaaagcattagggacattttgggaagggctgtaagagttaaatatgttggctttataggcagttgtaccttacacagtttaactcagaagttactcagtaatcacccatttatgcatgtgtatgtcttattcaaagatgtgtgcaacagtaccattttaagtatatatgtgtgtctttatgccttttgccttgccccaaaatgggagtgccctcagatggatcacatcccaccagtgggagctggtttctgtttcacatgtgtaatagttattgggggttttaggaatgggtttttctatgtttggtgtaattaagtgattaaagactacatccaccagattcctgtgtaacttccttacagtagtttatgaccatgttggggttgtttcctacagttctgatgggaaatcatatgtgactaaatttaagttaattataattaaataaaattaagaattccatttatcatttgcaccagccatgtgttaaatgctcagtagccacatacagctagtggccactgctttggccagcacagatacagaacacttttgttacctcagaaaattctatccggcagtgttggtctcaatgcttagttcacattttttatttacagaatcttttctgcctaaacttctagtttctgctgaccagttgcttatgacagatcctcactctggacctcccaggaaaaatattattgttccccagtttattatataaaactcaagctagcctgttttgacacctacatcattgaatgttctcttagtttacaggtcacagagctagccattaaagtggagtttttattttacagagggagtatccattctgccagggcagagtgaggctgtgggagggagtgatggcctctgaggaaacccccagcctgagttgtgaaaaccccagcaaaacctgaggggagaaaaggagaagaaaccaaggcacaggaaaggaattttgggcaaaatcaggaaatgcccaggtaccactgtacaaggttcccttgtgtttatcctcccacttccaccccactttagctaggatttactagaggggacagcctgtctctgctttctggtttcctcaaaggattttcctccagtttgtctccacactcactcagatggggtgacgtttctggatgattaatctagggagtataaactaagctcctccatgtctggaactttccctgggtgggcccctcactaccagccttatgttcagaggccacccaaggagggtgactgatgggtgggcgggcactcttctttgtattgtggggtttagttgcaggcccattgggccctcatgttgagtcttttctttcaaaaatacttctgtcagggataaaggcaaaattttggtttccatctgccattttttttttggtctttttgtcttgatttctttggaattcaagtggggaagaaagatgctgtttgttgggtgttcctggagacctcaaaagtcttggtaaaatgtttttccgaggctgccgcatgcttgacttgggctgcatttgttcccagtttagcttgtgtctgaacctcgtagtctgaagtgtatccagctctatgttcttgtggattctgctgcatggtggtggaagggcttgataaaggctgatggcatttaactgaggtttgaaggaagagcacagtttgggtaaagatggaggacaggatgcaaaaaacctagagacaggaaactcaaggagtgttcaaaaggggagtgtgaagccatctgggttggactgaaagactcctgcaggcacatgttaagagaaaggtctggagagatcaggatcatcagctggtgatatttctcttcacctcaaaatcattgaacatctttgctcattgtcctttctagacaggaacaggagtcctccacactccttcgaggtctgccttcctatcccctgccacctcctccagcatctcgttcccttttgtgtccgattttatgagaagggataaccttactgagcatttatctgtgttggacactttctatggattatcttattttatctttagagcaacaacctgtgacacaggtaatatgatcctctctttgtaggtggagcattagaggcaccaagtggataggcagcctgtccaaagtcacactgctggggtttaaaccaaggccagggtgaagctcttaactacactacagcttcttcctatttctcttgtaatttctttcttgttttacactccccttctgcatataaagatgttcacatgtcctttctcctaagaaacaagaacttcttttaactgttccatctcctcaagctttcctctgcctctctcctctctgttcctgccaaattccttgaggagtctgctaagggacacttcttccccaccatcacctccattttgctgctggaacgtgtggcattcagtgatggctctctctttattcccacttttgcagttgtcctgtagatttgactattttgaccatttgtcttccttctgtccttctttcctcttggctttctttaaactcaaactttcaggtctttctctctgcctgatcattctacctgttctgaaagccttccttgctcctcctccttccctatcaatgtctcacccagggcttttaatgcatcagagagccaagtcctgatggatcctaaaaggctgaacacaaatgtcttccaggaaacgtcctttgattcacctccctcttcctgaactctcttgcaatgtgtgtattttgtatctgttatctattgcttctaacaagttacccccacactcatcagcttaaacatcaaacatttattatctcacagtttccatgaatcatacattttggagaggcttagcttggtggctctgtattagagtcttgattgaggttgcaattgagatgttggctgcagtcacctgaaggtttgactggggctggaggattgtcttccaagatggctccctccatgactgttggcaggaggcctcagctcctcaccacatggaagtctccaaggagatgctgcttgggaatccttaaacatggcttttggtttcatctagagtgagtgattcaagaagaagcaaataggaaaccacagtgctttttatgtcctaatcttgggggttatataccctcacttctgccatactctatttgttagaaataaatcactaagtacaacctacctttaaggaagaggaattaggttctactttttgaaggtagaagtatggaagaatttgtgaacatattttaaagccaccatatgtattcctctcatggcacttataataggttgccttctatcttagatgtttatgtatatgtttttctcaattctgctagctataagctgcttcttagacatatttcctttgtatatttttttattgtgatgaaatatgtgtatatatgccattgaaacaatttttaagtgtacaattcattggcattaagtacattcacattgttctgcagccatcaccacagtccatctccagaacgttttcatctacccagactaaaactctgtacccattaaacaactccatattctctactccctgcaccccctggcaagcaccattctactttctatctctatgaatttgactactccaggtacctcacataagtagagtcttagaggatatgtcctttgtgaatggcttatttcatgtagtgtaatgtcttcaagattcattcatgttgtagtatgtatcaaaatttaattctgttttaaggctgaaaaaatccattgtacctaatgtagatgatgggtcgatgggtgcagcaaaccaccatggcacgtgtatacctatgtaacaaacctgcatgttctgcacgtgtatcccagaacttaaagtatatataaaaaattccattgtatgtatagaccacattttgtttatcaaatcatatgttgataaactcttgggttgtttccaccttttggctattgtgagaaacgctgctatgagcatgggtgtacaagtattggagtctgctttcagttcttttgggtatatgctcagaagtagaattgccagatcatgtagcaattctatgtttaatttctaaaggaggtactacactgtttcccataacagctgcaccattttacattcccaccaatagtgcaatttctctgcacctttgccaatagttgttgccgtctttttttttttttttctttttttttggacacggagtctcgctttgtcgcccaggctggagtgcagtggtaagaactcggctcactgcaagctccgcctcctgggctcacaccattctcctgcctcagcctcccgagtagctgggattacaggcacctgccaccatgcctggctaatttttttgtatttttagcagagacgaagtttcactatgttagccaggatggtctcaatctcctgacctcatgatttgcccacctcggccccgcaaagtgttgggattacaagcgtgagccaccgcacccaccttttttttttttttttaagacagagtcttggtctgttgcccaggctggagtgcagtgtggccatgatagctcactgtaaccttgacttcccaggctcaagcaatcctcccacttcagcctccccagtagtggggactacaggagtgagccaccatacccaaccaattaaaaaactgttttttgtatagacagggcctcattatgttgcccaagctggtcttgaactcctgggtccaagtggtccttccgtctcagcctcccaaaatgttgggattacaggtgtgagccacagtgcccggctgccttttgtttttgtgtgtatttccagcccagtgctttccacacactaggtacttagtaaatatttgttggatgaatgcatatggaggcaaacttcatattgtccaaattcttgtggcatttctggtgaaatatagtgaagaaaagatctcgggaattctggaacatttcctctgtatacctgacttttggaaaggggtcaccaggggtcaggcaggttatgactaggagctgttggaatgggaacccctgcctgcctgaagcaagcagcaactttgttttcaaaactggctaattgtcaccagatgaaggttcagatccttctagtgtaagaacagccagaaatctggatcttaaaatttgacatctctccctttttacatgtcagtagctatggcaggttgcattttcagtcccaattttgatcctctcgctgcctctcacccagttatggcttcatcatggacagagagtgtgtcctaaatcttcgactttaagcctggctctgagctttgcttttgccattggtgcatgggcagaatggctgtgagccagtgctgggccttaagaggtcatgtgtgtttccgctgctgctcttatgctgctgtcatcgtcatggaaagaacacacctggctgtcccagagaacagacgagcaacacgtgtgtcccagaagagctgcctagccagtctcagcccaggtctgtatttctgacagacctgtgagaaataaacagtgaatgttacatgctgctgagattttgtggttggtttgtttcgcttcataatgtagcaagaattaactgatgtaagaaggaactaaaaagctaaaatttatgcatcataatgcgataatagcagttggtactaatatggaaactaatttaaaaaataaaaatccagtattctagatttggctgtgacttctgctttagaaagagctcagaccagtagcaatgcaaatctgcccacacatctttttgcttttcaagtcaggtttattgaggtatactttacatgtttaattaaatctttcccagtgcagttctgagttttgacaaaggtaaaacagttgtgtaaccactgccacaatcaggacagagtaaagtcccatcaccttccctgctttaaaaaaaccccaacaaaactctgtgcccctttgcagataaatccattgtctacccccaatccctgcaaaccactggtcacttatttttgtttctgtaatttgccatttttagactgtcttaaaatggaatcgtatcgtgtgttggagaatctggcttttctcactcagcgtaatatatctgagattcatccctgtcgttgagtgaatcaattgctcattcctgtttattgccatgtagtattctattccatgattacaccataatttgttgatacaatttcctgttaaagaacagaagatgaagaacctaagatttggggctgggtgcggcagctcacgcttgtaatcccaggactttgggaggctgaggtgggtggattacctgaggtcaggagttcgagaccagcctggccaacatggtaaaaccctgtctctactaaaaatacaaaaaaattagctgggtgtggtggcaggcatctgtaatcccagcaactggggagtctgaggcaggagaactgcttgaacctggcaggcggaggttgcagtgagcccagatggtgccactgcactgcactccagcctgcttgacagagtgagaccctgtctcaaaaaaaaaaaaaaaaaaaaaaagatttggatcatcttcagtgttttgctttaatgagtaatgctgctgagaacactcattacatgtctttctgtagacctatatatttctcttgcataaatagctaggagtggaaataaaagattgtatggtaagtccgtatttaatcatgtaacaatgccaaagagtcggcttcagaagcagcatcattttgcactcttattaaaaaagcacagggttccagttgctccatctcctcaccaacatctgccattgccagttcttccaattttagccattttagtgggtgtgaagaggaatcttattatagttttaattcaaatttccctaatgactaatgacgttgagcacctttccatgtgcttcttggccagctgcattggaatttctctaatgagagaagcacccacttataagagagaaactcatgaagggggtggaaatctctttctttaaagatatattttatgtcttaatacataataacaattcaacaacaaacattattccagaaggatcaggtgaaacaaaaattttggttttgaaatgtccaaacccataaactcttgggttcaaagtagttagctatgtgcctttggacaagctactcagcctctcaatttcctcatttctaaggtgagaacaatgttagtaactaccccagaatattatgaggtttaaagggctttactacagtgcttggaggattgttatagctcagtaaatattaacaacaataataataatatcaacaattggctcagttgttaaatacttcagtattttaaaaaacctataaaacagcataagcttatgtccacacaaaattttgcacacaagtgtttatagcagctttttaaataactggcaaaagctggaagttaccaagatgttcttcagtaggtgaatagataaactgtgttgtagccatatgatattatttagtgatgaaaagaaatgagctatcaagatacaaaaagacatggagaaaacttaaaatgcacattgctaagtgaaagaagccaatctgaaaaggccacatcctgtacgattccgctatatgatattctgtaaagggccaaactttagacagtgaaaagataagtgattgccagaggttagggaggagggaaggatgaatagacagagttccgaggatttttagggcagtgaagctgctctgtatgatactgtagtggtggatacatgacattatgcattcggcaaagcccatgtaatgtacctcactaagtgtgaaccttaacacattaactgtggaccttaattaaaaataatgtatcaatatgggctcatcagttgtaacaaatgtaccacactgatgcaagatattaaaaataggggaaactaagcaggggagcagggagatgaagtgtttcagaactttccatgcttctcaaatgttctataaacctaaaactgctctaaagaataaagtctattaataaaaaagcaaatgaagaaaaaaataaaacatttttacttgaaaatgtttaaattaaatgtttcttctcagtttgaatcatgtttttcccaaagtgtgtgtgtgtgtgtgtgtgtgtgtgtgtgttgtaaactttaacctagagacaaattacgagatagtttttattttcaaaccagcgagaatgcaacaggtatgtgggggatcatatttatctatatctatatcgtctataactatatctatatctatcatctatctctatctaatctctctatcttcgtgttgtagttcagcatattacacattttaatgagcagaggaatcattgggcatcttgttaaaatgtggacaccaattaagcaggtctgcgtgggatctgagattccatatttctaaccagctcccagggatgccactgatgctggtccacaaacattttaagtagcaagtgtgtagacaaaagcaactgagtgtgtggagcctgactcaggtagggaacattatgtcatcatctcagccaagccctagcactgaatgtgtctgtctgtctgctgtgtggaaagactgcaggctgtaacttcagtaagatttgtctgtttaagtactgaagactttgcccataaggactggtttgcaagcccagctattactttttttggactttaccacagtcagttagggccacagtaatgctgagtaacaaaccacttaaaagctcagaggattaaaatgagcagaatttattctcgtgggtctacatggtaatttcctgcttgactgatttaggtcagctccacacgtgtctcatccttcctggaccagcagctccctagggcatgaccttgtcatggccatggcagaagcacaagcatgaaagccccactgcgcaaggacatttcaagcctctgctcacatcatgtccgataacatcccgctggccaaagcaaaccccacggacacagccaccttcacaagggtgggtaattttgctccacttacgactacataataatcccactacaggtgtgatggattaagacctgtaatttgacctatcacagtctttgcatcaacagagtaagaggtgaaattctacttagataagagcctcacccacagtaatacatgccatttcctgaagccatatcaaatataaaaaaatttttcaccactgcctctgaacaggtttcctgttgctgctgtcactgtcttagaactcaaagatatgtgggctgcagacatatatgcgtacatatagaatgatgctgtagttggaatgtgtgtttcctccacatctcatgttgaaatctgatatccagtgttagaggtggggcctaatgagaggtggctgagtcatggggatggatcttcatgaagagaggataacctcataaagagattaatgccttcccttttcggggatgaggcgagtgagttattgctctgttaattcctgagaaagctggttgttacaaacagcctggcaccttcccccgccttgctgcccccatgtgatctctgtacacactggttcccctttgccttctgccatgaatggaaggggcctgaggccttcaccagaagcagatgcttcttgtacagcctgcagaaccataagccaaataaacctcttttttttttttcataaattatccagcctcagatattccttcatagcaacacaaaacagatgaagatgaatggtggaacaaccaaccaaccaaccaagtgctgacaagtgtgcagagtgtcttaggttgagctgctgtaacaaaatattatagactaggtggcttagatgacagaaatttatttcttacaattctggaggccaggaagtccaagatcactgtgcccgcacattcagtgtctcctgaaggcccgcttcctggctggtagatggccatcttctggcttagagcatgttcaggatgggcaggggggctctcttcctgttattctctcttctctgttcttcttccttctcctcctcctccttcttcttcttctttcttcttctctctctctttttttttgtagagatgaagttccactatgttgcccaggctggtctcagactcctggacacaagtgatcctcccaccttggcctcccaaaatgctggtgttataggtgtgaagcactgtgcctggcctcctcttttcttataagcgcattaatcccatcatagcctacccaatttaattgcctcctaaagtcccagcctcctaatatcatgatgttggagattaggatttaataaatatttgaattttgggaggacacaaatattcagtccctgacacagagcaactagaatcctcatgcatttgcttgtgggaatacaaaatggtactttggaaaactattttggagagcttcccaagtggaggcttagtccagaagtcctttcccaaagcttgaaaggactagatagttacgcagtttacttatttatttgagttgtttttaaaatttttaaatttaaatttttaattttaaacacagtaatttagcacaggtctcaagtgtacagttgggaggtgggttaacaagtgtgcaccctgtgtaactactgcagtcaagttacaggacattcccattattctagaaagtccctgaaagtcccccaaccctcagtcccaggcaaccatgaatctgccttctgccttctgtcattatagattagtttgcttcttctagaacttcatataaatggaagcaaatggtgcgtagtcttttatgtcttcctgctatatgctgtttgagtccatttcttttctgacataatggggccagagaaatgccatcccaaagcagattttggtgatccctggttaccgcaggcattagtgatgccccacccataccctgcccccaacacagtggtgcctacagcctggctcccagctggctgcacttgccccagggctttctctggccattgacacctgccttgttcccatctctgcatgctggaattaatgtcctgggagcagtgggtgatggagtggttgggtaagtcccagctcccctgtccctcatgggagtggggttaacttgtcttacatgagtttcctagagttttcctgcaagattaaactccagtggcccagggtaacttcttcttcttctttttttttttttgagatggagtctctctctgttgcccaggctggagtgcagtggcgcgatctcggctcactgcaacctccgcctcccgggtttacgccattctcctgcctcagcctcctgagtagctgggactacaggcacccaccatcatgcccagctaatttttttttttgtatttttagtagagacagggtttcaccgtgttagccaggatggtctcgatctcctgacctcatgatctgcccgccttggcctcccaaagcccagggtaacctcttgagtacacactctctattggctggtttcccttctccatctcacttctccattcccccaacttcatctcacaaataagctacgttgaattcatatctcaggttctctgtctgggggcagacaaacaagattccaggaaatgatataagtttcagacaagaggcttctgcctgttgggtgtgtagaatggggatcctgacgtgctacctcattgtcttcttccgtaagcagttattatcaatctcttctcatagttggatttttaaacttgtatgcatctctcctgcccatgttctgagtttctgggagcagggatcacgtatctgcccttctgtgtatcccatgcaggctccagctcattatgttgggcaggattggtacttaccaaccctcaattgaatcatcaatcctgtgagaatttctgggacccaggccagggctcagcattgttaaaaatgtgactggattcagcaggggccagggaagtgggtgatggtcctactggaaaccagatggcccacagaacaaagattttaagccttcagaggagttcataaaagttgatttcccatctgtgtcgaggctcagaaggtatgatgtcttctcaatgtggagatcctggtttatgcctctggtctttgggtctttggtggagacactttcagaccttcctctggggactcatggtgacagccccatgctgccaggaagcagccttccacctgacgagtgaagaagaaaccccagctcctgcttgttcatgcttctgcacacactgcagatggctgtgtgtctctcaaggcaactgggggctgtgggccacgtggcattcagctccttagtactaaaatgtgttatattcaggtgtgtgcattggtcaactctcagcaaatgtacacttaagatttgtgcatttctttgtgtgtaaattttacatgaaaaactaaagaaatattgtactgtagtaaatgctttgcatactcaagtgtttgggggctactgatacctgtaatttactttgaaacataaaaataagataaaaataagatggagagcttcaaacaagtgtaatatagtgcaatgatagaatattggtgaatatttgagtgttgactgtagaaatctttcaactttgcaaaatatgcctaaaaattttaagaataagatgttggaaaaattgtattcaattaagaaaccatggagagagtgcacactcattacaaacaaagcagaatatataaagtaaaaggtgaaagtcctttccttctcctctcactgcatctgatacccaggtgcaggcaccttgtctgaggccctcacagcaagggtaaactcggtgacatagatttgttcccattcaggggatgggggtgggtgacacttcttaatcccattcccctattctgtttgacccatctgccagcccgacacctgtgagtgaatacacctgcccaggtgctgggttggcaagtgggagatggatttgcaaactttcagaaagaaagcccccagccacattttgttcccaatgaggaggctggcaaaaaagggaaatgacctttgttattgaaatgtaatgacaccaaagctctcaaaaatgatggggtttctccttgttgccttccgaggtgcaatggaagaagctgtgggtacctgtggtgggcacttgtcgctgtgcaacacccttttctttcctgttaccccaactccaattctgtccaagggacggggagccctgctcaggggtgtgaatcctgatggacatgtgattcagtccttgccagtgagaccagtggaggccttgggaccttttctttctggtaagcaataggtccaaggagaggtcttttttgtccctttggcttgggctgctgtcttctgaggatgtgatggaaggagccatggcagccaggcagccgtgaagtgacaaactggggacaaaaggcaacacattgaggatggtagaatgcaagagtggacacagcacagaggtcttggctgacctctccaagccatagtagaaaaacccaattttcagaccttggagggcctgttataaccccagttgctggcatgatggttcactttatgtgtcaacttgactgggccatgggatccccagaccagaggtaaaacattatttcagagagtgtccatggaagcatttctagaaggaggggacagcacttgaattggtggactgagtaaggcagatggccatccccaatgtgggaggcatcatcccatctattgagggtcttaatgggacaaaaagtgaggggaaggtggaactcagcctctctgccaggcctgagacgtggatcttctcctgcctttggacatctggggtcctggtccaggacttacaccaacccccgccgccccccagtccaggccttcggacctggaatgaattacaccccctgtctgtgtcccttgtttgcatgtgggacttcttgacctccaaaaccatgtgacccagttcctataataactcctttcatctctctctctatatatcatattggttctttttctttggagaaccctgattaatacagccgggtcccctccccagagtttttgattcagcagatctggcatggggcctgagaatgtgcatttctaatgaatccctaggtggagttgatgccactggcctggggaccccattttgggaccactgaattgaaccattatcagtttttatggtagtggttgttacttgaagctaaaagcatcctatttaataaaatggttttgcaattttttatttttaaattttaatttaattgtatttcttagggaacagatctccatgcctctcacattcctttaaagcatttgaagaattcagaaacaaaaagctacaaatctgctgggaccagatccttgggtctgaatggcaaccaaaggggaaagaatctcaacagggctgaggaagattgtgtccagttgcagggtgcgtgttttcaagatgccaatggggtggcagtcaaggtaggagaagcagcctgccacggtgcaggtaacaaggcagtagtatctgttgagaatttaaataataaaactgactagacagtgtctctacttttattatttctattggaggacaattctaaagaatgtcgttggggaagtgctcccttgagtcctggcatgttttggatttcttatgtatgagctgtggaactgcattcccctcggacacactgtggcaggagaatgacagccctattggggacctgcctgaataatttagatgggacggcgctgtctttgaggaaaatgagatacgggcagtggtggggctcagttctttgttgactgcttatagtgaacttgctggggaattcctgccctcctcattttaaaatctctgtgctgatgttgtccatacctggtgacctcatggcaagaacatggttttggaagacactgggctttgtttaactgctcagctttgataacagcagctcatccatctttgcaaatgtactttgaagcctttttcattcttctgcaacattcccagaaagaacgaagtttccagcaactccatataacagagctttgcttacacataagagcagtttggtataggaaaggatacaggctccaacttgatgaagctccctatggccaaatctgggacaatttagcaaggaaataaacaatgataatagtagattatgacccacagaataaacaaatacccacaagtccatgctgagataaataaataattgaacaaataaagaaatgggagagaagagggcaattttccttagagcagaattccagttattaaatctcaagggagtaagaagcatagaagatgactgctgggcctacctcacactgattgctgcagggatgggccatggatggatgcaacaagagtaggccagaggatgatgcaaaacagggcatttgcaaggtctcaaggcacctcccctaaagatactaatcacagagggaaaaacagtaactctacagtgcagaagcctgaaggagccgctttaaccaagtgatcaaggacaacatcggcagaaatgggacataacatcatggacgcctgctatggcacagtgggaagagcacaggtcacctctgtggcatccttgtcccaaatgcataacctccacctaaccaggagaaagcatcaggcagtcctcaaaggagggacatttttgggaataactggccagtattcaagtgtcaaggtaacgatagacaaagattgaagagctgccccagactgcaaggcactagggagacctgcaaccaaatagatatggtctcacatggtctgtagattagttagtagtcatgaaccaatgtgaatttctcagattagatcactgtactgtgattatataagatgttagttttggggaaagctgggagaaggttaaacaggtactatttttgcaaactttttataagactgaaattatttcagaataaaaagtaaagaaataaacaggtggactttggagtcattctgcctctcctcaaatctggctacactacttactaactgtgtgacattgggcaagttacttcatttctcccctcagtttccttatatgtaaaatggggataaaaagaatacctatctgggaggccgaggtaggtggatcactttagcccaggagtttgagaccaacctgggcagcatggtgaaaccccatttctacaaaaagtacaaagattagccaggtgtggtggcacacgccgtattcccagctacttgggagactgaggtgggaggatcaaatgagcccaggaggcagaggctgctgtgagcagagatcgcgccactgtactccagcctgggtgacagagcaagaccttgtctcaaaaaaaaaaaaaaaaaagaaaaaatacctatcatagagggttgtaatgagagttaaatgtgttaatacatgtgtagtacttagaactctgcaccttggcccagagcaagggctatactattacgtgtaattatcagaggagactggcagcatcttctgatcttagggacatttaatctctctgtgtgtgtctcactgtgcttctggaaagtttctgatgcaggctcctggactgattccttctccaatcaattactctggcctaaaagcatttccctttctaccagcagccagataaagccaaattcagcactaggatctgtagtattaacttaagtattacccacttaatgggacttaagtgttacctagttttagaggaataagaataacttctgtctcacgttgggtttcactgaggagatgtctgcattggaaagacagagctcatgtcactaaagaagcttctggggccagtttcccttaaccccattgcagcctgcagaccttttgggcttgcaggaccaacatccctgattggtttgggaggggcgtgtgtgtgtggatctgcctcacaatggcctgtctgagcccttatctgaggtcacacgttatcatttgtttggccaataagactgtagcacacacaccagcttcagtccccacttggccttacctttgatgtcacaatctgacctgtgggtattaatctggtcacagctgctcacagactagatggcaaggtccaggggactagcacaggaagatgtggaagagaagtgaccatcaacccaagatcaaagcagaggatggacctctggtgggccagttcgaggttctgggttcagttccagaacctgccatgccacatcctctagagctgtcagaatttgagagcttcccagtgtttcaggacattaggcttcacatcagggaagtgggagctcaattggtcaagaaagtcaatgccgtctttcagctggacatcaccaaaaatgggaagaccattttgcggtggaccattgatctgaagaatggttctggggacatgtatccgggacctgccaggctcccagcagacactgtctttacaatcccggagtctgtctttatggagctggttttgggcaaaatgaacccgcagaaggctttccttgccggaaagttcaaagtgagtggcaaggttctgcttagctggaagctggaaagggttttcaaagactgggctaaattttaagcatgcaaaaataccaaggaagaacttctcttcgatgataatgtcgagtggaaatcatgcttaatctgaagattaaagtaaaaagtatccaatatttttactcaaattcttcctattcaagtttaattgattttcctgttgatgggtaaattttcagggagggttctgaagcagtaaaaagcgttgtagtgcatcaattagaatctttgtctttttctctttttttagctccatttatgccctttatgctccatttatgccagggtgagagccacgtgtaaagaaatgggtgattatgatcattggaattaaatactccaatgattgtgttcttgagacatttttccttttctaaaaaagtttgatgttttggggaaagaagtgataactatcattgtgcaggtgtgcattctgcatggtaacttgattccatgaggaaactttactatgagactgtggggtgctaagggaatggggcaccacaggtctgtgggtggaacccaggcaatagaggggatggtgctgttggtgtattataatttctgatggtttcaattccaagaaacttgaagggcttgggaggtgttctaggccagtggttcttaactggagcatgcatcagaatcaccggaaaggttggttaaagtctggattgctgggctccatctcagagcttctactcaggaaatctgggctggagagaatgcacatttctaacaagttcccaggggatgctgatggcaccacccttagagaattccagctctgcttcacttcatgccaaagctctcagtattgactgtaactattctattctaggccaatgagatggtgccattaattaaaggatctcccagagacagaccccacagccctctgtgagccatttataaagtatccatgctgtcaggagcttgtgcattgaacattttacaaaatcagagggcagcctgggagatttcccttccggaagctcccttcacatgttgtctgggaggataggatgaagtctgttgcagctgatgcaaactccttgtgggtgagtgtgtgtgtgttcttggttcacatgtggtttgtgtgtacctttgacttgtgggctaaatatacacagtgtggatactctgaaacctagaggaaagtttcatcacaactgccatgctcaaacacctacacagtgtggacactctgaaacctgggtggaagtttcatcacaactgccatgctcaaatacacgcctaccaaataatcccaccattctgttcttgggtattttgttaagagaaaagaaagcatatgtacaagcataaaataaacactcgcatgcatgtgaatgttcatggcagctgtgttgggagtagtcctaaactggaaacaagccacatgttcatcaacaggtgaatgggtggacaaattgtgcggtgtcataccatggaatattacttagccatgaaaaggaagaaatgattggcatacacacaaatgacaatgtggataaatggcaaaataattatgctgagtgaaagaagacagagaagactgagcacatactacatgattcgatttatattaaatactaaaaaatgtaaacgtagtgacagaaaaaaaaaggcagtggttgccaagagacaggagcatggggaaatgaggaaggatggggggattatgacaaatgtcatgaggacacttgggggtagtgggtatattcattatcttaattgtggtgatgttttcccaagtcaaagcatcgccttgtgcaatgcatataaacccatgcagtttattatgtgtcatataagctaatcaggttgtttttaagaacctgccaccctcccttagaaataaggcttttgtgtggctgtgttcctgaagaggaaggatcagcaactctccccttctctcagcaagatgagccctctcacctcatcttggtctagtgttcagctcctgactatttggatggctctgcagaggccttcctccatttcatattagagaaaggcagagtgagaacttgttgcttacaaaatgtcatcctctctgtgggaaacgaagagatcatttgtcctgagagtgctctactccacagttagacattgctaaggggatgggcatggacttagtgcacatcctggcttcttctctcatgtgcgtcattatagaggtgatctgcatcttgtccctgtcagtgcccccagcctgtgaatgtctcagaggcttccaatggattctgagctctgttgtgagcactcagctccactggcccaggccactcccattcaaccatgtttgagtgtcaggcatggggccggcaggtgtttggggtgccattgtgtcacattccttttttcttttttcttttttttttttgcgacgaagtctcactcttgtcccccaggctggagtgcaatggaacgatatccgctcactgtaacctccgcctcccgggttcaagcgattctcctgcctcagcctcccgagtagctggatcacaggcccctgccaccatgcccagctaatttttgtatttttagtagagacggggtttcaccatgttggccaggctggtcttggactcctgacctcagctgatctgcccacctcagcctcccaaagtgctgggattacaggtgtgagccattgtgcccagctgtgccacattcctttttaagggaaatggctcacctaagcccctgctacctgggagtcctgctcataccatgtgttaatcatttggccctgagatgggggttgcttagagatgggagagtgggcagaggggttatgcaggctcatgcctgggctggcatctgacctatgacccattctgacttgggacaaaaaaagtgacctgagctaactcgattcctttctcaagaatttggaactgggaaagtgagagcctgagctacaatcaagcagcgagaatggaatgggagaggctgggatgcagggggtgaggaaggggctgtgaggaagggcagccatggggcaggggctggagagatggaggggcaggagcctggagtagggagagaaaggtggtcaacaagcgaggagtgggaagcccaggcctcggaaacatgaccgcaaacccctttcaatctcaagaaaacgttcaatgctgaatgccacgtgaagctgctggaaggactcagattctggaatcagaagcggaattttgagcccagcatcaccattttacacctgcctgaccacaggtgggtactgaaccgcctcttgcccaagcttcctcatctgtaaacgggaccaggagccctcgtgatggtggattgctggggagccctcattcgggcggcccaacagatcccctagctggaagtgggcttcctgtgcatgtgagtccctttctccgctgggtaagaggaagggcaggcacttaggctggctccccactgcctctagggactttcctgctttttctcctatactcggctggtgccctagaagatcacatgtggctcaaaacacacatctgtgttttgtttggtctatacaaggtgggccaacacagtgttagtaaagtttgaattaggacattgtatataaaaaattggatttctgtattctctttaaaaattcggtcatttggatacactgagcctgtattcctgccaggcaacggctgcgggtgtggagcgggtgggctatccagacagaccgaggcccactcctcccagcttggcctccctggctctgaaggtgagtgttggtggctgcagtttccttgggctgggccagccttgcagggcccctgtgggtatttgtgctgatgaccgtggctccctaccatacatggtcttactcttcgcctgtcagtgttctatggctgtgtaacagattaccacacattaagtggcttaaaacaacacccattcattaactcacagcttctggaagccagaagtccaggcaggctgagctgccgtctcagctcccatggctgatcttaaggtgttggccactctgggctcttctctgggggcttgaggggagaatcttttccaagctcattcaggttgtggcagaattcaccttcttgtggtgataggactgtttcctatcagctgggaatgctctcagcaacttgaggctggccagatggctcctccatctgcaaagccagcaatggtgtgtcgagcccttctcaggctttgaatctctctgaattcttctgtcttcatcttctgcctcttcatgaaaggactcacgtgattataccgggccactcagataattcatagtaagctctctatcttaatgtgaatttattagtaatcttaattatgtctgcaaaattccttctgccatgtgaggtaatgctgtggagtgaatgtgtcaccccagattcatatgtcaaaaccttgaaccccaatgtgatggtatttggaggtggcgcctttgggaagtaatttgggttagatgaggtcacaagagtggttccctcatgataagattagtgtctgtattagtctgttatcacattgctatatgaaaaatctgaggctaggtaatttataaagaaagaggtttaattggctcatggttcttcaggctgtataggaagcatgatgctggcatctgcttggcttctgacgaggtctcaggaaacttacaatcatggcagaaggtaaagggggagtagcacttcacatggccaaagaaggagcaaggattgggcaggggaggttctacacactttaaaacaaccagatcttgtgaaagctccatcaaaagaacagcaccaagctgatggtgctaagccattcgtgaaggagccactcccatgatccaatcacctcccacctggccccacctccaacactggggattccagtttgacatgagatttggtgagaacacagaaccaaaccatatcagtgtttttataagaggaagagaccagagcgctcgttcgttctctctctttctctctttctttctttctttccttctttcttttctttccttctttctctttctttctttctttctgtctttctttctctctttcttttctttctttctctctctctatctctctctccctctctctctctctccattcccccctctctctttcttattctttctgccaatgaggatgtagcaagtaggtgaccatctgtacaccaggaagagggccttcaccagactggcaccctgatcttggacttaccagcttccaatgataagaaataaaagtctgttgtttaagccgcctgtctatgatactttgtgatagagcccacacaaagacaaataatgtattcatgggtgtgatatctcatcctagccacagtcctgaagactgaggtgtaggatcttcttggaggccataatcctaccaactcccccgcctccaccatctacattccatgcatgttctcaaggtcatcctccaggaaactgccctgattgagctgttgtctttctctcctacaatttgtatacctctcctttttccagctctgtgttctgcctttgcatgggtgtggtcctatgtgggccacacaaatgccctggcttatctgggacattcccagtttgcccccagagatcccacctcttttgtctctgaacagggttagatgtgcactgtgccctaggaaggatggagcaaatggctcacggcccctgtgggagtctcagtgaggtgcacctggctgcatggagaccagactgagattctggatcctagggcaactcttagggacctcacgattttgcaggtgattttttccattctccaaacaagaaacagggaagtaggactgtctcagctcccatgggtggatctgttcacatgtgttttggcacaagttccaggacagcaccaccaaagagggcaaggtttttattctggaggttttaagttagcgaagatcttggatttttagctgtaaattgccagtttcttctgttcactgactgactgagcaattaatctatttgcctaaaaaatatttttgagcactcatgatgtcttaggagttaattacttttggcagggctgatagtaagctgggatatatgaggccagaattggttccaattggtcaaacaccattctggttttcagtgacccgttctgatgggtttttttccctttgccatatggttatgaaacattctggaaatcactcttggtttgaggagctggtggcaagcaagctgaggtttcttttctccaggagcttgtatttccagatgggagttgtgggtgggttgtggggagacaagcaatagacagcaaacaaataaccagagaagacacttgagaagggaagggaatgtggctaagggggcctgggtggccagggaaggcctctctgagaaggggcttcctgaacctcacactgtagtggcaggccctggggcaaagatgcaactgccagctgtggatttgtgtggtgattccaggaaatatcccttggggagtggggcagtgggacagggagggaaggaaggtgatacagggcatattattgagcaggtcattgttgaggggctcaaccccacagaacagttcagggagacagggtagaacacccctcagtgttgtccagcccaaggaaagagggagttacagaatttttaaactaattcccatcagtctttggttgagggcttgtgatggtaaatactgagtgtcaacttgattggattgagggatgcaaagtattaatcctgagtgtgtctgtgtgggtgttgctacaagagattaacatttgagtcagtgggctggggaaggcagatccactcttcatctggtgagcataatctaatcagcttccagcgaatataaagcagacagaaaaatgtgaaaaggagggactggcctagcctcccagtctacatctttttcccgtgttggatgcttcctgccctcgaacatcagactccaagttcttcagttttgggactgggactggctatccttgctttgcagcttgcagacagcctattgtggtaccttgtaatcatgtaagttaatacttagtaatcttctagatatatatatatatatatatatatatatatatatatatatcctattagttctgtccctctaagagaaccctgactaatacagggctgctcctgggacaggggtttttgattccctgggtctgggcatttgagagaaagccctccagcagttggaagtcagttgcagcagactctgatgatgaggtccagagaaggatcagagcaagtgctgagtcctggcaatctccagcagcgcttgcatttgaaggggcaccaggacacagcagttagaactcgaaatctggaagcagactgcctggggctggatcttgcctcattgggcaagttgcttttatttactttattgttttatttatttttattttattttgagatagagtcttgctctgtcacccaggctggagtgcagtggcacaatctcaactcactgccacctctgcctcccgggttcaagtgattctcctgcctcaggcttctaaaggactacaggtgtgcaccaccacacccagataatttttgtatttttagtagagactggtgttaccatgttggccagggtggtcccgaactcctgacctcaggtgatccacctgcctcacctcccaaagtgctgggattacaggcgtgagccactgcacccagcctatttacttattttttaatgcatttttaaaattgaagaataacatacataggaagaagtctacacattctaagtgtgcagctaacaaacttccccaaatggaaaacacccgtgtaaccaacacaacatgtggctcaagaaataaggcatgactggcgccccagtaatccccactcacacccccttctagttactgttgcctccaggataaccactattttgactctaacgccatagactttagttttgcctacttttgtgctttatataaatgggaccatgcagtgcacactccgctgtgtctggcgccttccattcagaattctgtgtctgagatccatccacactgttgtgcacagttactgctcgtttgttttattgctgagtggtgttccattgtatttgattgtttccagtttagggtgattttaaatagcgttgctgtgagccctcttgtatacctatgggaacagaagtctcattttgccacttaatattagttagtgtcttatcccagtttgcagtggcagctacagtgtggtgtcttgcacacagcttgtgctttataaatgtttgtggcatgaattgagaggcagggcaagtccagaggtagagaaacaggccttgctgggatttggtgtctggttcactgggcctctgacctcctccatgatcctagactttgggccccacttgctgggtttcagagggaaactgacagccacagggcagaggagacaaaaaggaagtctcccaggtgtgccattaacatgcgcagtgcttaaccatgttgggaactacccccagatgacagctgagaatcctcactgacttttctttgaaggaaaaaaaattcttccagatctgtaactaggctaatcacaagaaacatctgtgacctcctaaaaatatctgcttggtaccattttgtagagcataatatttatatagcccagcagtgtaattaaattgatgtttagttaactcttggaaacagctgaaggctcccaaagcccaggatgagatctgcaggcggccctggaatgggcttgaaaggggccctgggaggtgttcctgcaggctcttggtggggggtcctggagtggccacagagattgggtgggcctgaggaactaaggaacatgctgtgttgagggactgcgtggctcactcaggggcagctggattatagttgtttctatatttctgtccagcagcctctggaacatcatttcctgctgaggaaaggttttctcttaaaggactaatcagaaagtgctctgtctcaaagcgcctttgctgttgttttgtagcctgtggagatgaagtggggtaatggtgggtttttctggagggttttcatgcttgtttctggagaactgctcgtattggtggggatctcagccggcagagagtggagcccgtgctttctcttactcctcatcaataaagaaaagagcaaagttgaagcgagttttttcttttttggaaaaagaaaaaattcaacttttattttagagtcagatgtgcaggtttgttacctgggcatattgcgtgatgctgaggcttgtggacgactgatcctgtccccaggtactaagcatagtttttaggcaaaggggctccatagcttttcagctgggcaagtttctcactggagaccctgaggcctgcaaagcaggactggagcctactgcgggcagggcctggtgtggggtctcctctgaagccttgagatgccataaaaacatcaggcctttacaggggtgcctccagagtgcggttaggggtgggattcagaagggcctccggggagcttgagaagtctggagttgggaaggcagtccagggacagtacctcccgttttggccatcccctttttttggaattctgctctttgcatgaggaaaagggaaaacccattgatgttttgagcccgtaagcattcctttattcattcattctgtgataattaccaagcaactactacctaatataccttctcggccctgtgctgagagtacgggatgcaaggctgagcaaaatggacacctcctgatatggtttggctgtgtccccacccaaatctcatcttgaattgtagttcccataatccccacgtgtggtgggagggacctcgtgagaggtaactgaatcaagaggatgggttcgcccatgctgtcctcatgatagtgagtaagttctcatgagatttgatggttttataagggactttcttcttcacttggctctcattcttctccttcgtgatgccatgtgaagaaggacgtgtttactgtcccttctgccattgttttgtttcctgaggccttgccagccctgtgaaactgtgagtcaattaaacctctttcctttttaaatgactcagtcccaggcagttctttctagcagtgtaagaatggagtaatacacctccgatcctcagggaactcccagtgtggtgcctggctacacacacagtgagggctcaggagggaaagctgaggggctcttcatagacttggtaggggcttaggacagacttcctgaggaacaagatcagaggaatgagtgagaggtccctgagacagggcagagatgagaccgttccaggcgaggaaacagcatgtgtaaatgccctgtggctcacagagcacgatgagttccaggaacagaacaagaccagtgaagatggagaaagggggtcagtggcagaaggttggagcctggggcccagctttgtagactgaagccagaactctggtggtcatccttacatgacctgagacctggaaccacctgctacggtgtggactccatgctggccttattttattctggaaaagaaagttggggtgggcaatggcacccttaaggctggagttgccagaaagatttaggttttctccccatcttgaaatgtgtaaccccagactcctccaagccctgatggtgaccatcaagatggaggtggctctatgacatcaatgaagggacagtgaacaaggacctaaacccaaacccagctccatgaaattgagggcttcatctcagtgtctttccaagccacagcctaataggtccttaaacagactcaaagggagaaacggcccagggaagaaggaaagccaccacttgcatttcccagtggcgccgccttttattccaagtctaaagttatcccaaggccacacatatgtggacaggggatggtgtgcttgggtgggctggtggtgtggcgccatgggaagtggtttggaggatgagagaacttggtgcccagatccacaatgccatccttacctctctaatgggctcttgtgggacccctccacaacgtagggatgactccagatggtctctgtttcccttggatatttataatcctaaaaacagatcagtatttaaaagttaatgaagaaaaggaaagttagctcagcgataacaataaaaggtggtgttttgggcacatttgtctatgttcctggcattgcattcagggcttaacatgtatcatcttatttcttgtcaccactacttctgaaattagctccatttccactgggagggtgaaaacctgctgaggttttggctttagaaaggtggtggtgcttccccctacttccaatccatgtaactaaaaatctaaaaaataaaactatgctaaaccataaatcaagtgcaagatagattaaccaagttctgggtgtttctccacaatgactagtttgatgtgtattttgaaacattattgtacataattgtggttctttttatgtaaatttgaactatatgattctgagtttaatataaaataaaaataaagtctcactttacaacccaaatatgaaatagaataccaagagattaaagagagttgggaatctcataatttcaagggccttaagatagactggtttgtgagctttgttgaaacttgtccaagatggggctgctctcagctgttaagagggaaacccatcatgctttgtgttgttactatggaaaggttggtctggacttcagtgagctgggatttacatgaggtcttcaggaaagtatctctctaataaataaaactgccatatagcaaattatgttggaaaaaaaatccctcagtgcctttgaattgtgtgtggccacagtaggtactttctctgcctactgggtcacttaggggaagagaagttaagtgacttgcataacaacacaaggtcatggtggagctgaggtttggaaatgggtctgcttggttccaggtgtcttgttgagagagatctagtgttcctgacctcctctttaaattactaaaaaaaaagaaaaaaaaaaatcaaagagctagacaggtctttgaaactcatttaatccagggcatgcgttttagagatgaatgaactcaaatccacagaagaaaaactgaatgacgcaaaaccatggctactgtgctttggttggcttcaccagttttccagggaagctcttgaaagaggcctgagctctacttcaagctggttcttagcctcgctgtgtggtcacaaggaggctacttgccctctcttggttcaaggccctcctctcagggaatcaggtgggttggattacgtgtactcacattccttcaagcttgaaaggtctctatctctgattccagcctcttctcattgattgagttacttcccattgtctcttggggataaaactggggtggtggtaaggggaggccccataagaaatggggtggcataaatgaaccaagaatgtagaggcaataatttttccaaggaaaatttatttagtaaagagaaaataaaatttctttccttttttattttaaagaaatagccagtattggagttcaagatgactgaccagtgtacaatgaatttccatttttctttattacaaagaatcactcagagatgctctcctattttcatacccacacaacacataaagctcaacacacacttgcatacacatgcacatcaaacatgccctgtcaatcaagcatcacaatgagctgaattaatgagttgttcaaggcagacagctctgggcaggacttggttatggctttggtgggagtctctttggagaagtccatttggtggggtgcataggcacagaaccttgaaaaactttccgagatgtcactgaccagcttggctggtatctaaaattgtctcctgtttatattttcttcatcttgaacaactctgtgacatatgattagttataaggtttctcatatctcccaatattttctctgaagttggattccaatgtcttttttgagtggcagtgtccaaactacttagagccacggcaacactgagtcacaagctatctcaaaactctgcaataagtagtgctaaggcacagcactgaattatactcatggacctgcggtctgactgaggatctgctaattcaggctggctgggccctgcccctccagtctctcatctcctttccctccctgctatggtttgaatgtgtccctcaaatttcatgtgttggatactcagtccccaatgtggcagtattgaaaggtggggcctttaagaggtgattgggtcatgaaggctcttctctttacaaatagattaactcattcatgggttaatgaattaatgaattgatgggttattgtagaagtggaactggtggctttataagcagaggaagagaggcctgagctagcatgctcagctccctcgccacgtaatgtcctgtacggtctcaagactcttcagagagtccccactggcaagaaggatttcaccagatgtgacccctgaaccttggacttctcagcctccagaactgtaagacataaatttcacttcttataaattaccctgtttcagatattctgttataagcaacagaaaatgaactgagacactcccctttagaccagtggcatggtccgggcacattttccccatgatgatggcagaggggaaacgcatcattgggctaacatcccacaggccagagcaagtgatatggccaaactcagaagcaggaagtacggcattaaaatgcacatcagaagtgaaggaagagagtggaaatgtgaagacagtcatcgtggtcaatatccactgtgacaaacttatcagctgtggtggttttaaacacttgcaaattctttgttactcctcccatcaagaggtgggatccaggtcccctccctctgagctggggtgggccattgtggctgcctcgatgaacacaacgtggcagaggtgatactgcatgactttctaggcttctgctggtttcttgcagacttctgccccttgtgagaagttctgacaccccaaggtccccatgtggggagaccagacagagatgctcagggatgcccggattcccagtgaggaatctctggagagggccgcagacactgcatgtctctgcaaacacatgggagtccctgagcaagaactgcccagtggagcccagttgacccccagatccatgagcaaatcattgttccggttttatgccactgttttggggtggctcattatgcagtattagataactggaaaatcaaggctacagtttctagcaaggaatggtgcataggggtgaactgcagctcccccacttgccacccggttgtgaccttggataagtgctctgatgtccctgcccagctttttcatctataaaaatggggatcatgttccctgcctcctatgattgctgccagattaaacacctagcacagggcctggatggtggcgggtactcagtcaatattgatggagtaaataactgcttactgctcaacggggctcatagggtgaattccggctgggtagagctcggaggccaaaaaatgggcagatgggatgactgaaacagtgctgtggttcagcctaggctacaaattatggctgttagagactgtgtgtgtgtgtgtgtttgtgtgtgtgtgtgcatgctttcaaatcttcctttaataaggaagtgaggaagtggagacctttttttttgccctgttgcccaggctggagtgcaatggcgcgatcttggctcactgccacctccgcctcccaggttcaagcaattctcctgcctcagcctcccgagttgggattacaggcacgcgccaccacgccaggctaatttttgtatttttagtagagacagggtttcgccatattggccaggctggtctcgagctcctggcctcaggtgatctgcctgctttggcctcccaaagtgctaggattacaggcatgagccaccgcgcctagccccctttgtagtcttgattgatgtgtgtgaaacccatttcctggagctctcaggggaacactttttttgtgtgcagatccctatttcatgaagttgcagggacatagaatatataatttgtttggggcattgctttgagcaggctgataaaagtggaagctaaaaaattaatgtagtctcctccctcagatcctgtagccagcctgtttgggtttcttccccatctctgcaacctgaagggaaggatcttcctttttttgccccatacgatccacaggaaggatcttccttttaacaaacttcttcttgacaaataacacacataatgcagaaggtgcatgcatcctgtgttcatcttgatgaagtttcataaactacaggcacccgtattttcataaaccaacttccagatccagaaacagaatcccttccagcaccccagatgtcccttctcctctttcttgtccctacttagtcctccaacccagggaaaccacaattctgacttaaaaataacattgtttagtttccccagttttgctgtcccataaacaaaatcatgcactctgattttgtgtctggattcctcggctccacactgtctctgtaacactcacgcatttgttgcacatcttttggctcattcatcctcttagttgtatcacatgttattttatgactataccacaatttatttatctgttctactgttgatgggtagtttccagatttgtgtcccatctacctgtctctccagcatgaaacttatctaacttacctctccagcatgtggcttaaatacctggaacatttgcttggaccatgaaggaaggaaggcaggttctttataaattcaaatccatcctgtccggttgcccacactgtgctgagtgtcctcactggctgctccagcctctcccacccaaatggccagacttcaaggagtggggggtgagaaccctctcccttgtctgttccaacggccagtgcctgaaatctcacttcgggagggcccttcctttcccaccgttaaaatacaacaacccggccaggcaccgtggctcacgcctgtaatcccagcactttgggaggctgaggcgggcggatcacgaggtcaggagatcgagaccatcctggctaacaaggtgaaaccccgtctctactaaaaacacaaaaaattagccaggcgtggtggcgggcgcctgtagtcccagctactcgggaggctgaggcaggagaatggcgtgaacccgggaggcggagcttgcagtgagccgagatagcgccactgcagtccggcctgggcgaaagagcgagactccgtctcaaaaagaaaaaaagaaaaaaaggaaatacaacactcactccacccagaagacatgttctccaaagtgagccttctatgtcacttgtcccgaaagaaaagaaaagaacaagacttcctgattgataactgatctgggccaggaatgcagcagcacttgatgtctgagggaagcggtttttcattgaagaggggaggaagacgaacgtgccccaaagcaaggtggggactttgactacaaactcagtggggctccgctttctgcctgtcgctggctcgttttatcgggcactgcgattgaagcaggagattagatttgggacctttaactcaacctaatcccaaatgcacctttattttatgtctcactgaggaagaactaacattgcaatggaaaactatggcatcctgctttctttagaattttattttcaacttatttgaatgggctttatatttaattaggtaaaaatttttataatatagtacttgggtgaatataaaaagaaaaatataagcaaaataaaattggttaatatattctaaatttcttaacattgacctgatttttctgattcacttttgactcccaaattgttgttgcctgtggtctctccactcctctggcaatgtcatcctgagtgccatgaagagccttggtaatacagtaattctgttctttaattttatctttaactaacaaagaatgattgcatatatttatggggtataatgtgatgttttggtatgtgtgtacattgtagaatgataaaatcaagtaaattaacatatctatcacctcatgtacttatcaatttttatgataagaatatttaaaatccaatctttaagcaattttgaaatatacaatgctatgattaattatactcatcatgctgtacaacagatcactaaagttttgaccctctgcctggctgaatattgtactttttaatcaaaatctctcttttctccatccacccccatcgctgagcctttgataaacaccatcctactctctccttctatgagtttgccttttgtcattcatgcacgaactaaaagcattggccctgggttctgaagctggttttgcagcctgcttctgattcctgctttgaagagggctcctgaaggcatattttcccttctcactcccagaccaattaggagaggctccaggatttccatgcacatggcagataccactctgctgggtttgatgctggtgcttttgatattcatgcatgtaacaggcaaaggcaactatatggcatgactacttcttagaggaggtggttgtaaggaagctttgatatatactaagatgcattccaacttcagaactgctaagatacagaaaaaagtataaactagaatcaatgcaaaaatcacagccccatccctgcctgctggtcagctgtgccatcccccagaatcacggcctcccagaagcatgcagccttgtcgtgagtcataacctgtgtctgaacacttgatttatcttcctctttctggaaagactgtacgtaaactgattacattgctctactccccacttccctccaaactaaaccaagtaacacaattcattggcttttctggagcaagaggagagagactgatatcagcattcagacccaggagtgctgtgggtatgttcattatctaggcataaaatggctcagcatcaaagcagccctggggagggttaatgtccaggctctcttctgcttctgctcctgatgtccatcatacttacctctttgcagggtgtgctgcaggtctggactggtgagaactgagcctgggagaggagaccaagcaaaggcttaattttctgctctgttttccccagtttgcccggggatcatctttagcgctggcagatgggaggttttgttcttcattgctcctccattaaagtgctgtccctgagatcccttagaaagagtttgttttatttgttttttggtcagaggtgcattcagaaaaaggcccaggcaactccccagaggaagttcattctttatttttagtggctcaggagcctggagatgcaatattaatcttcttccacttcagagcttgctgagaaaggatttgggggcttaaaggggatggcttacttgtcttttggttcagcatgataatggccacagactctgtgaagggactctgtctgttctacatgaggttttgaacagattacttttctcagccagcttcctggggagagactcactttcattgagaagatgccctgagctttgtagaataaaacaatgcttcaggcccgatgaaagagacaccgttctgcagaggccagggaatgcttttcttgatgttctggagagaggcaaagtggaagagagaaaggagagggaggctggggactggcaagaggccccactgtgggagctcagatcgttaatcataattctcccacacccctgccatggccccagacgtgggggaaggggatgaggtgttttcctctgactttaactttggctgtttgacttgttttggttactgggatgttaacagatatcacatgggtagaggcttgaaaggctcttgggtggggattttgctctgttgcactcctgacttttaccatagcaagaacatgccttgggtatttgtaggaccaggggcaagaagaaacacatggaacagacctaggcccaacccacagcttgtgccaagtccacccaagtccagaccattagccaaaccccagccaacccacagatatgtgattagagaataaattctcattgttgtgtaatactgtgctttgggattatttattatgcagcacattgtggcaatagctgactaatacagaactctttcttattctctcaaatcattaataaaatcaataaattcatgaaatgcttgggataaacgatgttttaaaaatgagaaccagtgagggattgtgtgtgaactgtaaggccgtattgaaggagaaggaagcatttggaagaaagttccagatagaggctgcagggacagctttagagcctcataaggccatggaaattggggttgggctaagttttactggctctctgagagacatagaccactcagtggatagtcagcttaaataagaaaggatacaagacagacgccaagaattcaggtccattagtcaaagttttccagagaaacaaaaccaataggatttgtgtgtgtgtgtgtatttatgcatatgtatacatatattttatttatgttttaaaagaattggctcaaatgattatggaggctgacaagtccaaattctgaagggtgggctggcaagctggagacccagggaagagtcattgttgcagtttgagcctgaaggtagtctgccatggagccaggaagagccaatgctgtagaacaagtctgaaggccttctcatggctgattgcttcttgctcaagggaggtcagtattttgttctacttcaagtcttcacctgactggatgaggttcacattatgcaggatgatgctttagttcaccaatttaaatgttcatctcattcaaaaccaccctcacagaaacatcaaaatgtttgagcatgtatctgggcactgtggcccagccaatttgacacatgaaattaaccatcacagttggctttaatctttctctagttctacaaaaagaaacccattggctccatatcagcaagttataagttaccaaggagatagctagcatccaactcaaatcatatcccagaggacgtgacttgtggctattgttgagaaaattttctattgggcctactgaatacaccaagctttgtcaaaatatcattgctaccattctttaaaaagtctttattgggctatagcatacataagcagagtgcacaagtcataatgtgcatcttgatgaattttcacaaagtgaactagcactgggtcaaaaaacagaatattaggaacacctccaagcccctctcacgctcccttctaatcactactctctttctaagggtaaccattacctcgccttttaaaaccacagattagtgttgcctgctgtgtacattatggcaggtgtattttccaaagaccgctgcactaatatatcccatccttcctttcctgagaatgtgctgccaacattcctccatctctgtttcctccctttgagtatgtgtggtcctgggactatagcagcagtaatagcatgtgacttctggggcttagttataaaagacaacgacttcctgatccttttggggtgatcccccttggaatccagccacatgcaaggccaagtcaatgtattccaaccacagctccagttgaggtctcagctgacagccagcattggctaccacctataggaggagaagctttcagatgattccacccccctgcattcccatcttcccacgtacctcagagtggagtagagatgagttgtcatctaccaagccttgcccaaatgcagacttataaaaaaatgttgctgctgtttaaagccactaacttttcaggtcatttgttgcacagcaagagatagttagagtatactttatacaaatagtgtcatccagtaggtatactttcctgacattccacattatgtctgtgagagtctccatgttgttgcatgtagtcatagactgtttattctttttgctttatagtatgtggttatatgaataaaatacaatttatgtattcattgtgctactgacagacatcatttatttctagttggggctattaataaaagtcaaagattctagtacatgtcttctggtaaatgtaagtacatgtttctattgggcatgtacctagaattggaactgctgtgccttagagtccatctgtggtccacttcagtagttactgtcaaaaagtttgctagtattcttttttgaacaaaatgttaaaagccatgtcataggcttgtttatggagtgatgctctgaggtttgatcctgtgagggagggaggtcagatcagaggtgccctagtcatctctagaaaagacactaggtcagcattggatttattcactctgtaaccccatggccaagtaggcttgcaaagaatgtgatctttaacagcaacaatttgtagactgggagcctcctggtgttacacaactgtggagtagccctttcttatattcctgtttctgacttccctttaacaaatttgtgaaaacacacacaaagtcaaattttggccttgtctttggaaacaatcattgccacagtccaaggaagtttccagtaggtgttccatgattaagaacattcgtgagccacacaccacaggctttaccctctaaatcagattagtctggaaagaccctgatggagtaaagggacaaggctaaattgcccttttatatgccttggtttgtattttcaatggaaattaaacccaacagccacagaacctgcaacccacaactgaagcgatgacgtaatgcaccatgactgagatgatggcaaagataactgtagtgctgttgctgcccatccaacagcaattatgaagacaccattaataatagccttgatttcaggatgatgacatatgaacaaaatgtgcttgtaagaatggccacaacacagcatttgaatatcatgcccagccacaatctctctccttttgcctgtgtatttggattgtacatgctgatttttgcctctgtcagcttagataagtaaagataacttaaatgtgattcctgattctgttaatggtttgaaataagtattatagcttctccatgtccctatgtctgaatttatcagatgttcaggatggatatttcccaaaaggaaacatttcttgtacctgtcgctggtgttgaggaacgtttggggtgctcctggtaggaactgttcctttggaaatgagatcttagatatcacccttagggctaacaatgtctgggaagcagctgagtggtccgtgatgtggacaagggagagagcaggacagggaagtgagagagagagaaagattgagaagagagaagcaatgagacagcagccgccaggatggcaggaagatgtggaagaggggagaaagctacagctgatagagattggttaaggcctcagagggcctccgtgggctgctcccatgtactttggctacagagcacaaaataatgcacttgaagggttcttgtgagcttcttctataaaatgggatgatgttaatgatggcgatggtgatgatctatatgtacctccttatgttattatgaagatttgtagagatgatacttacacagtctttatctcagcacccagagggtaagtgcttaagaaatgtagtgaatgttaaaattctacacaggtagtaatctagattgtaaataacaaaccttgtctgataaaaatctggacaataatctggctatttttttttgtttttagcacacatcaatgaccagttttcaaaacagattatcatcaggtaaatgtaattgaagcaaacagagtgacatgtgagacactttagaatcctgcagtgtcccaggaaatctgctgggaccacgctttgccataggcagtaaagccttttgggcaggagtttatgtactgcatgggttcaaatcctggctctgccattcaccagctttatgaccatgggtgagttgcctaacctctctgagcctcagtttctcatctgtgaaagggaaatagtgatagcatccattacatagagttgttgtgaaagcttaatatggttaggtaggcaaaaacttaaataggtctgggcacacaacactcaatatggtagttctccttatccatggtttcagtttccaactgtgaaaatagttggaagtggctgtgtctttccacgactatagctctgtctggtccctgccctccacccaccacttgacccctcaatgctctagcactcactggattccagctcagacctaggtatgttaatgaattctgacgactaaaaataaaatcctaagccctgcagctgactgaatggactccctcttggctaaggggaccccagagaaacctaaaaaactgagttgctggccatgacaggatgggaggtcatacacaccttattacccctgcccttttgcagtttagacacaactaccagcattaatgttaaaatagagatcataccactgacagtacaggctctctgtggcaataagataccaaaataggacctaaggctgtgccaggcaagggttaagtcatacaagcaaagaactacactagaagaataaactgtgttctacctgccacaaggcttttctttctctctatcagctaaacaagcaccggtcttgagataagcaatattgaaacagttgcagctcagctgccaccagatgctgacctccacctactgttccacaagtcatctttatagctttgattggacaagagactgatttctgtaacttactcctgattaaagaccattgacaacagaccggctctggctggttttacagagcctgcacacttaagtgtctttgtatccctgcttcaccttttgccgtatagggcctaattgtaatacagttcatgttaagtctccaccccaaggtgaacacgggtcatatgtaacatacatgtttattcagtatgcatgtgttaagattcccctgtcatgaatattcatggagcatcctataacctgttgaatatttatacttggccaacccgctcagtaaaaattcctatcttaccctttcctccttcaaagtgcctgctaaaggtctttgtgggaggctgcttcccaacctgtcaggatggccacctcacaggctataaccctttataaggcaggataatcacttgagcccaggagtttaaggctctagtgatctatgatcacaccactgcaatccagcctgggcgacaaagcaggatttcatctcaaaagaaaaagaaagaaagaaaaaaagaaagaaagaaagaaggaaagaaagaagaaagaaagaatcttttccaaatttaaaggtctcatgattagccatttctagtctttgggtgcatcagcatcctctctttttgatcttttaatcctttccattttttatttattattattatttttgagacagggtctcactttgttgcccaggtttgtgtgtagtggtgtgatctctgctcaatgcagccttgatctcctgggctcaagtgatcctcccacctaggcctcccaagtagctgggacttcaggtgcacaccaccagacctagctaattttgtttatttttgtagtggtggggtctcactatgctgcccaggctagtttgaacacctaggctcaagtgatcctcccacttcagcctcccaaagtgctgagacttacaggtgtgagccactgtgactgacaatactttccattttaataaatttctttctaaaactacctaaggtcattttctgtttttgctgaacccctagaatccttctccaccaagacttgggttttgcaatgttgctgcttctgcagttgttggtgttgagattgacgtgtcatgatgaaggagttccttgaattttggaggggatagaccttgggtgttctttgagcaaaattgcattataaaagatcttttcagtctgtcttcacagctatgggacagtagatgactgggcaaagaatccctgtggctggctgcagaaggttgcaaaaatggccacacttgttcattccttgctgtatgcatctctcttgcaatgtgactttgcagctcctcccgttgagaagggagtctatttgtatgccccctgaatctggcttttttacttgctttaactagtagaatgtagtagaagagaaggtaggccaattctgggactgtgctttaagagggcttgcatgtttctgcttgttttctttgaacccctttctctactatgaaaataatccagagtaacctgctgggggaccagggagctaatgctccagagccaactagtcccagttgaggcccatacatgtgagaaagcccggacaagaccaacaaagccaatttgcagctgcagacatatgggggcagccagctgagaccagtagaatcgccagctgagcccagcctaaagttctgactcacagaattgcgagctaaagaaattgctttagacaaatgtgttacagagctatacacaattgttattctgtctgttgggtggcctaggctataatccccatttcctggtgactcagagacatcttccaagggcatgtgggtgggtgggcattttggtcatgccaggctgttcacactccactatcgctaacttcatttctcaagggagggaacaaagaaaaactcctttgttactgagcctgataagggaaagaggagagaagcaaagcagttacttctgcctttggtgtcaatctctgagctgagagccaaaattagtggtttgccatgtaccactccgctcagcaccgcttcccctgtcctgactcccctgtttttctatggaagcagctgctaccctgcttctggtatgtctgtatttcaaagctaatcctgtttcacaaaggcagactccagaagcaaagaattctcatgtcttgactgttcagctggcttctgagccattcaggaagcagtgggaacctgtttgcatattgctctaaatgggaaattagcaaacacaatatggtaaaattgccccgaattggaaggattaatgtaaggatgtaagatggacgggagcaaaaactgtaatcagaaacaatggcgggtgatgaatggagggaaatgagaacgccctggcagcacccagggccccgtctcacgttccttcccactccattcctctcctccagcctggaagctgattttgtttgccaaacccttgccattggcttccttgcaccatgtccccagctacagggtggggtgagcacatctgtgccctgcacgctgtgctacccagactcatgtgtttctcaataaaaagatagtgcaaatgcaggcctcacctcctttcctgcggacttgactgctcttggattccatgtcctgggtctacagggtattcttttttttttttttttttttgagatggagtcttgctctgtcacccaagctggagtgcaatggcacgatctcggctcactgcaacctccgcctcctgggctcaagcgattctcctgtctcagcctcctgagcagctgggattacaggtgactgccatcatgcccagctaatttttatatttttagtagagatggggtttcaccatgttggccaggctgatctccaactcctgacctcatgatctgcccacctcggcctccctaagtgctgggattacaggtgtgagccaccgcgcttggcctctacagggtattcttagtgtgaattgaagggcaggggaataacttaggttagtgtttctcagcccttatcgtctattaaactggtgactagcagtttaaccttaaccccaagagaggaagaggggcatctgcagtcagaaagcagtggaattggaaaccagactgtgaggagttacctttttggtgagcttctgtatttgcggagtcctgaattgaatgacttttcaaagacagaattagattcccaagaggcaattactgatatgctaatgataactttgaggggaggcctgggaacctggaggattgtctgactgactttgggatgaccatctgactttgctctcatgactcaaatgagcaatcaaggggtttgtaaacacataaggcttttgatgtatactcaaactgttctccagaaaggttgacttgacttctaggcgtgtgtgagagtgctcattgacccatctcttcatcagcaccaggagttgtcatggaaattgtaggtgaaaaatatgccatattgatttgtgttgctttattaccagagagagagagagagaataaatatgcttaatttgatatttgtatttcttttgtaaattgctcaaattatttgtttttttcttttgaagttttaaaaattgatttttgaaagttcagtatgtatgagctattatttttatacttcaagctacatctaattgccattgccacatttcccagtccaatataataggaaactctggttaggtgaattacatctaattattaagtttatcaagcaattgtctttcttatgtggcacacttttttttttctagattgaattttacttgtaagtttgagtggataggtgtgtttttgccattcagaaaactttaatttgttgtaatgagatcaatcttttctttcaaaatttcctccttttagggcatagataaagcttctccaacccagattatatgggtctctactaattctattgtcattttttctcttacatctaactcattcaggcatccaaaatttattttggggttcactgtaaggtagagacctaacttatttttagaaaatggtatttagatgccctgatggggccacagttccaaacatcctgggtagacatcaggagaaggttgtccccaggcacggctggcatcttgaatgaaattaaactctgtgtggcatggaggcagagcaacccctgggctgggggccgggtggatatccagctattaactgacaacatgctcccttcccagaccatttccccagaccaagacctcaggaaaagctccaggcaggatgatcatacatttattgtccagccaggacacttttgagagtgaaaaggacatcatttataattacacaaggactataggcataaactggggttttccccaggccagctggaatattttgttatcccagcctacagaagactggctctccctcctctaaggactgaggattgacatctctctgtggagtgaaagttgcctcttggcagctcacaatactagagaccagcttctgggtgagcaaaagttaactagctagatccttggacaaatagtatgtctctttccagagaggaaacaggaacaggagagaagtgaagataaatcaacatgtttccattaggatgtgcattattcctgagagaaagatgggctgaaaacatgttgcctttggaagagatgctggttgggcatcagttacataggagattgatgggaatttcaatggacaatttgcatatccatggatctctgctagttctgagaacagtaattaattttctggaacaagaatgacttcattttctaggaaaaggatggtctgaatggttttctaaagagatatgatagtcacaaatgtcttcctgtctctcctttctccccttttcagtgccagagcacagcagccacaagtatagatattggattggctattgaaggaaattcaaacaatatcatagtctgttgctggcccacaggcttgaggagcaacatgcctgcttgacttgctctgcagaaagtttgctaccaattgcttggatgtgtcacggtgtccccactacttcatgaggggcaaaaggggtggtgataacttatcaccatgattggggtataaatgaaaacagaataatgccctgggaacaggttcccgctttgaaagcaaatcacttcatctcgagatagttaaaagacacctttctgttgcaaatcatcacggccttagtggctaaaagcaacaccttatagacttcctttatagaccctacgattacatctgaatccactcagataatccaagataatctccccatctgtgttagttcattcttgcattgttataaagaagtacttgagactgggtaatttgtaaagagaagaggtttaattggctcatagttgtgcaggctgtacaggaaggatggcactggcatctgttcagcttctggggaggcctcagggagctttcaataatggcagaaggcaaaacggggcaggcttgtcacatggggacagtaagagcaagagagagagtggaggaggtgctgcactctttaaacaaccagatctcatgagaactcattatcatgaggacagcactgaaccatgagggatccgcccccatgacccaaacacctcctgccaggtcccacttacaacattggggattacaattcaacatgagacttagaggggacaacatccaaaccatatcaccatctcagggtccttaacttaatcacacctgcaaagtccctttcccatggaaggtaacattcacaggttccagggattaaaatatggacatactgggagttcattattcagcctaccacagggtcacttgagacgcctttcagaaaatgaattctaaattcgatcaaggccaatggctccacacagaacgcctctgtcaggacagaggtgatatctttgattttgacagcaaatccctcaagcagtgctcctcaccagcttctaaaatgccaagcactttcaaatgccaagggacatattggtggaggtggagggcatgtacacagcagatggcatcatggggtgacatgtttgaaagaatgtttccaaaagcaaactccaaaatatcacaccagctacagatcatggggaggcagtggagaaatgaaacacagtgtcatagaagggaaccagatggaggcccacagagctaagaagggtgagggttgagggagacttgctgcttcttgcaggacacagacagtggggttttcagaggtgctgattagttgtttttttcctctagctttagggcaccagagtatcttcttgcgtttcaccacttgctccactgtctgtaaatatgtaggaggttttgtataagctatataggagagaatttcacagtagcctttgtttagtttacagttagcagaatagagggagacagcaggctgagtccttctatacctccgatgcttgcaggcttaggggatgaccaaggaggagggacagggcagatgtctgccttaatggagagaacctggaaggcctgatatttcagaatgagacacagaaattccaaaccctgcctggacagaaaaaaataagaaatgtagtttggttaggaagtaagtctccaagaccttggacattaaggctcaatttcgtgcccaaaagaaggaaataccagaaaaactggcccccaaccccatacgtggcaccttttgatcattcaggtggacctatagtcattattcaatatatgacatcaggaacagattactttctaaataggcagcttgagagagtgaaaatctaggagctttggatttgggtctgaatctcttttttaaaggccccaaacatttgtagaccatttgtaaaatgagggctttatctaaatcaatggttttcagatattttgggacctccttgaagactcccacactagtagttgtatttttttaattgaaagaatatatacatgtaatgtaattgagagatcatataagaagccatggcctcctacttgtattctaccaaaagtggactccaagacaaaagcttgagtggtgggagtttatttgggaggtgattctaaggtaatccaaatgaaggggtgggaaaatgagattgtaaggagaagcagccaaggaagtgtgcaatagtgatcagggtggcctctgcgggcagtagggactccgttccactggagtcttcttgaagaactgcttctcaaagggtgattccaagatcagcaacgtggcatcatctggaagcttattagaaatgcaaaatcttgagtctccaccccaggagctctatcatgagcttcaacaatccatgtcgtgcaagccttctgggtgattctgatgcatacgaaagtttgaaaaccactggtatagaacatgccacagaattgtcccactgagcagttgagggatgaggaagctggagtgataatctgccaactctcctccctcatgggttgaggttgcttgggaacatggattcctcagcacactgggctgctctgtgcatggtctgagcaaggtcccctggtgttagagaaagctctcaggcagagaatctgaaaggaggaggtgcttcagtgtggataccgctggtgtacacaggaattctccatcatagctgcgggtgaacccaagaggttagctgaggggcttgggtgggaaagcaacagaatctgctacatatgctaagaatttgggggcattgatacatatttgcaaatagaggtgcatatgtagaggtgcctacatatattcattaaacatatggttaaggctaagataggtgtggaggggatacttagggcctttgcatatttaaatcagtatagagttggtatagtttggatattgtctcctccaaatctcatgttgtgatgtaatccccattgttggaggtagggcctgatgggagatgattggatcatgacagcagatgcctcgtgaatggcttagcatcgtccccttgctgatgagtgagttcttgctcagttagttcatgcaagatctgtttgtttaaaagtctaagaccttccccctaactcttgctcccactctcaccaggtgaagtgcttgctcctgcttcaccttctgccatgcttaaaagctccctgaggcctcaccagaagctgagcatatgccagtgccatgcttgtacagcctgcagaactgtgaaccaattaaacctcttttctttgtaaattacccatccttaggtatttcttcacagtgatggaaaaatgatctaacacaagggtagtgttttcacatccgtggatttaccagtcatgtggtatgtaataacataattttgccttgtcactcatactgtaacttctgtggagaaacataaaattgatttttctgtgaaaagtgattcaagaaagaaagtcatcagtcagttcaggtaagtcatatatgtggagagaaggcaaacaattttttttgaccttttttttttttaattatcctttaagttttagggtacatgtgcacaatgtgcaggtttgttacatatttatacatgtgccatgttggtgtgctgcacccattaactcgtcatttacattaggtgtatctcctaatgctatccctcccccctcccccgacccaacaacaggccccggtgtgtgatgttcccgagaaggcaaaaattcttggccgaaagaaaaacgttattggagaaacaataggcaatggacccctttatgaggaatttggggtactgggtggcatgaagctgttggactgtggcttttccaaatgtcaaagtctacttggcctgtgtccttaattgtttttattgattctctcaatgtagctcaggaaaaggggctggcaagaactaggcagggtcccaactgagagagctggggtacaatgcccatctcttgttgcaatagaactaaagtgctgtcttagtccatttgtgttgctagaaagagatacctgaggcttgggactttataaataaaagaggtttgtttggctcacagttctgcaggctgtacaagaagcatggtgccagcatctacttctggtgagggcctcaggcttcttccattcatggtagaaggtgaaagggagccaacttgtgcagagatcacctggcaagaggaggcaggagagcagggaggtgtcaaggtcctttcaacaaccagcgctcttaggaactagtagagtgagacttcatttgttaccccaaagagggcaacaagccgttcataatggattcacccccatgacccaaacacctctcattaggcctcacctttgacactgggcatcaagtttcaacctgaggtttggagggtcaaatacctacacgatagcaagtgctatgtgaaaaactgaggcgaaagcccagttgtcttgtctaagcttacggcaaaaataaggtgaaggttggtggacattaagatgaagggctgcccctggttggacacactccaggcctgcaataccatggcaaattgctgctctcatctgctgggtggtaggaaggggagttttccaaggctgggcggaagtggtggtgagctgtgtagtgttcttgttgcctcccatcatattcgctggctccacctctcacttctgctgcagtagcaggctgagttttctggaaagcaaatgtgaggtcagagttaggaatgcaaaatgtttaccgagaaaggaaaaaggaggaagcaggattgcacagggggagctgtcagtccctgatacagacctcacaaaatctgcacccatcaagattgtgcaagagaggagtcctctgttgaatggagaggtctcggcccttctttatattgctgccttgctcagttattggtggggcactgccctgagaagaacctgaacttggcttgatgaccaaggtggatcctgaggagttaacagctggaggatgtcagcaggaccagcgacataatttgtgaggcccagggaaaaatgaaaatgggagtctcttgttaaaaatattacggatgtcaatcaagatgatgccagcagactattaagccaagtgtggggcccttctaactacgggactctgtgagacttatgagtctcacctatgacccagccctggctgccagctgaccatcgtttgcacctcacagcatgtcccgttttgaaggggatcttagcagggtcctcccatgtcttctgcaggtcaggaccttctctgaagttgcaggaagtagctcaacctgtccctgggtgccactcatagctgtgggtctgtgattctactggggtcagccctcaatcagtggagggacaatgctgaggtgtgttctacagagttctcagagggttcccagcaagaatgagctgcaattgtccacagcaatgatcaacttagtaaaatgcattttttttttggcttttccttcttccctgtcctgctttctccactctttcaccctggcttttcagaaccatctcctagataagccacctgcacctaagtccttgtgtctgtctctgctttcaaggaaactcaaacaaaaacacatgctcttggtcaggactaactcaggaattggtgtccctggcagaacatggctaaagaaggaagaagcagatatgcataacataagttatgttttctcatattcctaaaggaagagactgagagaagtaacttgattaacaaccagccaacacccattgccaggggaaatgaggttattatttgctttggccacaacggggattccatctaccttttcagttagagacccacattgtcatcaccagtaatccgtcagacaggcggaaaccttggattggggctttatcgcaagtggattgaccatccattccatgtaatgggagagttaatattctctccagagaatggctattggcacgggttctttccaattaagacctgagttgatatgacttctacatccaatttggggaatgaaggagggaactttccacaggtctgtaaaagttagggctgccctggttaacttttgtcttcaactgtgtgtaaatgttgatcgttcaaggagggtgaagtgccaactcttcataaaaatttaggtcagggagagtggggtttgcgctaaaagaaatgagaaagttattgttataagttaattttggagactgtggtgggctttgtgatgatgagatgtatagatccactttatgaaaatctagccctcccagcttctgagagtgctgctggtagacatctgtcagctgttagcccatttggggactggctggctcagggttatacctccttccaggggcaacctgcatccaattaccagttgatgtcgggtaagaaggcatgatccctccgtgctcaggagtcagctctgaagagccacttgggcacccgagctcacaggaggttggctgaggcctttgttgagatcacattgcagcttagctttttctctctgcctaatcctgcttccttctcttcccttccacaagcattgatcccaagaatacttcctaagaggcctcctgcaagctaatcttcatcccagagactgattttcagggagcccaagctgtaatgatgatatcatccatgatattgtgtgttaacagcaaccttcagctgggtaggctctttgctgtgtcttgacaaattgggtttgtcccaggcttaacgttttctattcaacagtccttctttagtgacagtttcaggagcgtctgatgtttagagtgctgctgtttttttttttcaggttttatccaaatgagtttattacaaacaagaaaaattactggctttcagcactttttagatttcagaattgtgaataagaaattgaggacttacagtagtgtcatttttataagattgttgagaaaatcaaatgggactgttcttaagttttcagggagagaagcagctcatgcttcccagtgacatctctgtttagcaggtgagagttttgttttctttttaagttaaggtgtaattcataaacagtaaaatgcacagtccaacgagctttggtaaatttatatgcctgtatagccaacaccctcatcatgatagaaaacctctccctcatcccagatacttttttgtgccccttttccagtcaataccttcaccccagcccctttcaaggggcaaagcttattctgatttctatcatcatggctttgtatggcttcttctagaatttcatgtgatgaaatcttatggtatatactcttgtttttagtttctttcacttggcatagtgattttgagattaatcctagtttttgcatattatttgttctgtcttctcattgctgaggagtattccatcattgggatgtagcaaagttcatccatttttctattgacggacatttggattgtttctagcttttgctagaacataagcgtgtgtggacttaggaagaaatatttttgtgtggtctttaataaatgtttttctttcttttaggtaacaaggagtggaattggtgggccatcagtaaatatatttttaactttataagaaactgctgaacaattttccaaagtggctgtatttatttacctttcccagggtgagagttttgctatttaattgtccttgattcatagactcagcaaatattagaacaagtggtgatcttggagcttctcacatttttctaccaagtgcctctgaggtcagaagaggagaaaagcatactttgggaatggaaagtgtagactgatgcagccaaccaagcatcagtgtctcattgtttatactaaagggtcatggaaacttgcgttctactccatggtatagatacactatgtacttaaacgtattaaccatgaagctggagttcccataaagattctacaacttcatcccatggctttgagccctgttatccaccagcccccaactgcccacacagcccttctcctctgaagtgtacatctgatggatttaagcccattcttctgaagcacagatctagtcattcactttgttttactgattgccactcagatgcagagaagtgaagtggcttttctaaggtcacacagctatctaatgagaaagtcaattacttgaacctaatttgctttctttctttatttttttcctttctctattttagagacaaggtcttcctctgtcacccaggctggagtagagtggtgtaatcatagcccactgcagcctcagactcctgggctcaagtgatcctcccactttagcctcctaagtagctgggactacaggcgtgtaccaacatgcccagccaatttttacattttctgtagagatggggtctcactatgttgcccaggctggtctcaaactcttggcctcaagcaatcctcccacctcagctccctaaagtctgggattataagcgtgagccaccgcactgagctgagaacctgattttcttaaccagcagccaagaaaaaggaaattatacagagcagcaaccccacctcctccttgatcctcaggtggggacagtgaaagatttggaccaatgcccttttctttgccaaggggagttttgtatccttttagacctcaaccttgccctttgctgatgaagcaattgccaccagttcctcagaaggaagaaggagtctttagtttttcaggcaaatgaaattccacctttcactttaagcagcctcgggatgcaagcacacacaaaattcacatggattaaactgttaatataccaaaggggatgccagcaagtggcaataacaattagaaacacaagcatcaaactgcaggaaactgcccagaaatagcagcctcctccaaccccctgatgtggatattagcatgtaagggggaaagatgacagtgatgcagggaggcatttggctctgtgttctgtctgttggcagagaaagtgtctcttcttattctatgcaagatgttagcaaagggctagccacaccccaccttagatggattcatagcatggcagctgcaacagagctgtgagctggcctgcaggtgttcaccccagacaccagtcctcagcagacagagtgtgcataggggtggtgccatgccatgactgtttcatcaccaagccatggtggaaagaaacagagatctgaattctgtttatgaatccactatgaactagctatgtgactttgggcaatttacttcatctcatggaactgtttcttcatctgtaaaagaaagagttgtttgtttattcattcattctcttccgagctctgttaatgactattaaacacttcatggctggcacaatgatgagcttctgggatacaaatgaataagataggactcctaccacaggagcttggggaagatggcatcactgccctagttctctattccaccctgtatctagtctatcctctttgcatttgatttttcagcgtctcctactaaagaggtggagtctatttctccaacccttgacttggggttagactacgtgacttgcttggggtcataaaatgaggtgaaagtaactgtgccagttctgagcctatgccttaagaaaccttggcatattttctgcttgtgtctctgctactgccatgaaaaatacatgtccaggctagcccgctgtttccagaggaggatgagagacacatgaagcatagccatgccagttgaagctaacccatatctgctgaccccagtcaactcacagacacataagcaagtccaactcagattagcagagccactaagcccagatcaaccaattcttggctgatctgtttgtatgtgacattactgtggtcatagttagctgtagagagtgcccaggcaatcagacatttccatacagggagatgaatactttgatagaggtaagctggggatggtgaggaggtggaggtgggcaatttaagtacagagaaaggcacttagcccagtctggggcttttataattgttcatacatttacctttagcagagatatttatttctttgaacagctacgagttactctccagtggcttttgtttcaacctgaaggactccctttagcatttcttgcatggtaggtctagtggtaaagaatcatctcagcttttgtttatctggcaatgtcttaatttttccatcatttttgaaggacagttttgccagatataaaattctcgattgatggtttttttccttcaacattttgaattaatcaatccactgccttctgtcctccaaagtttctgtgagaaatctgttaccaatcttattgggacctcttgtatatatgaattgtttctctcttgcagctttcaagattttctttttgtctctggcttttgaaaatttcattatattgtgttggtgtgtgttgttttgagtttatcctgcttgaaatttgttgcttcttggatgtctttattcatgcctttcatgaaatttgggagaattttagccaatgtttactcaaataatatttcttctctttcctctctctcgtctccttttggtactcccacaatgcgtatgttggtcagcttgatggtgttctataggtcccttagagtctgttcacttttcttcaatttttcctttctatttttcagactgaataatttcaattgtcctgtcttgaagtttgttgatttcttcttatgcctgcaaaatatgcttcgaatcattgcagtcaatttttcgttttagttattgtacctttcagctccagaatttatttttggttcctttttattttgtatcctaatgttttatgttttctgtccataatattcctattatactgtctttatatttctgtttgttcatacatcattttcttcatgtaataatttgtctatgttttctgttaggtctttgagaatctttaaaacagtcattttaaagcctttgtctaataaatctgccagctgttctttcttagggagtttctgttgattttttttttttcatttgactgggccatactttcctctttctttgtatgctttttgatttttgacatttgaaccttataatttttaactctgaaaatcagattcttccctttccacatggtttcctttatttttaattgttgtactgcattaaaagtttaaatagactgaaattaattgcaactttccattcaagcttttgcctggaagttgaaagccttcaaacagactccaagtttcaaaatagttacatcagacagatcctgccagtgcatttttttgtcttggtggggagatagattcctgtgctttctgctttgccaatcttcttgttgtcactctgcatatttagttttgtaagaaattttcaaatgggtttccagcatggatatgtcatttcacattcctgcaagcaattaatgaacaatcccatttctctacactattaccagcatttggttttgtcactattttttattttaggcattttgataggtgcgtagtgatgtctctctatagtttcaattagcatttcctgatgactaatgatgttgaaaatcttttcatatgttttttttttttccatttgtatttcctctttggcaaactctctgttcttaaggtgtaggtgtcttgattcagctcctggaatcaagcttcattaaagtccttctacattccttggccctaaatgccataatctcaggcagcagcagtctacttcctttttgccagtcttcatggaagcctcattttagctcctggctgcaagcagtgaccccggctttccctcttgtctcaaaatggaacacctttattccaattaccctagctgaaaagagccaaactggcctgttactgagaaaatccacacagaaaatacatacttcctttgcgttcactcagggctttttaattgttcattccatagtacctctttctttgttttccagaacatggatatcaactcaacttcaggcatatgtgttttttgaagtttctctgcctaaaagccctttgggtgacagatgactggaaggaagatactatgctagtgggtaggagttaggttgtgtcactctggtagacactgtagctaccctgttcatatcctctaatcccataccagaggtcatctgcaggccattcttgtacacatcatggcatcttgcatctctgccttagcggttctggtggtaggcatgtgctctgtctgtgaacagggcagcatgaaagtgttgcagacttaatgcctcagagacaactctcaaccaaagaggaatgagagttggtggattaatgcccctgcttcctcccacctcaatgatacaatattaagacttgttttgcacagactttgatcacagtttcctaccaagactgaagattctgtcatgtttactcataaaggctcaatgtctctaaataataatgggttttattttgaaataatttcagacttagagaaaacttatgagaatagcactatggaattcttttactcttttcccagatgccccaaacattaacatttatcatatttgctttattattctttctctctatctgactttctctctctcttttctccatgccccaagcttcagtttcttaaaagacaaggacatcctcttgcataaccacagtgcaatcttcaaaatcaggaaattagcatagatgcaatactgttagttaatctacagaccttcttcaaattgtgtcaagtgtcaatacaatcctttataacaaaaccaaaccaaaaacatttcctgatccagaattccatccagggttatgaattgcatttagttaacatttctttcttctcctttaatctggaacttattcttcagtctttctttgattttcatgacattgacatatttgaagagcataagacagttattttgtagactgtccctcaattttgttttgtctgatatcccttctgattagatttagttgatatgcttttggcaggaataccccagaaatgatgtgcatacatctttctcagtatatcacatcaggaaggagatgatgcctacttgttccgtaattggtgacgttaagaccaattgttttttctaagtgaaaaacttaagaggaaatcatcaaggaggagctctgttcttaaaaatgaggattcatatggctggtggaatcagatttcccttagacattcttcattcctatccctcatttacattatttgtgccttgagggaaggattatgcatgtgagaggtgatgtatacacccacatgtcaggcctgagctctggcctcaggaattgtataagatgaggattctgctcttctgcccagctccttggactcagaggaagttgggaaatggggagatgggttagggacagtaatgtccctccagcatagtctgttttacccagctctggttgagacatgggttaacaaatccagtgggatctatgcctatctatgtaggttttaccttctttgataatagactaggcattccagctgccatgttgtatatttgtggtttacaaatgcagtgctgctcataaatactcttagaagaatatcatgcgaggttttaaaaattacttaaacccttaaatcctagtttcttcatctgtaaagtggtggtcctaatactttctagtgtaattatgaaaattaaatgttataattgatataaactgcagtaagcacctggaatacaaaaatgttcaataaatattatctattaatgttaatgatagtaactaaagagaagtctgcactgtgagttaaggaatctcagtttgaatttcaacctaagtactccctggcttagtgaatttggctaatcatctaatctctgagccttggttttcttgtctgtaaattgagggtaataatattgttcctagatacccccatggattgttggaaggaagaagtggtctcatatgtgtgaaagccattttcacagtggaataattttgtaaatatgagtggatacttacattccatctctataccatgctgggctgcacatccatgaaaattgtctgggtttagcttatagcaatggggctggaagtgaccattggctccaagacccaccagagaaacctacatttcctgccttgtccctcccataaatcctgactgtcttttaagtctgtccctaaaatgacccttggaatgcctttggtggttcctatccctttgttggctgaatagcctgcctgctgtggtattgtgcctctatagtctcattgcccatgtgggaggctgctaggccttgtggggcccctaggccgtgcggagctccaccactgacactgctcaggtcattctgctgaccatgagatggggaagaaccctctaatctgtgtagttgatattgataggattcatcacaatttcttacagatccattgtaccagttgctctcaaccttggctgcacattggttatcacctggtgtgttagatttcatatatatttatgattctctttctgtggaattacacacacacacacacacacaaatatatgagagacagaggttgatttatttaaataattggttcgtgtggctgtggtggctaacaagttcaaactctataagaacttgccaataggctgaaagttcacataagagttgatgtagtcttgagtcccagattcacagagcaggctactaggctgaaaactcagagagaatttctatattgcaatcttgagaccaaattctttcttcctttggaaacctcagtctttctctttaaggccttttactggttggatggaacccactcacattatggaaagtaatttgccttaatccttgtttactggtttaaaggttaattacatctaaaaaatactttcacagcaagcaacatttagactggtgtctgaccaaacaactgggcactgtagtgtagccaagttgacacataaaattggccgtcatatctgattctttaaaaaataccagactggaacccagatgagtcattttgggaatttccagctttctgttactgatttctagtttaattccattttggtctgagagtagacatgtataatttatatccttttaaatttgttatggtatattttatgattcagaatgttgtctatgtttaattttctctgtgagcttgagaagaatgtgtattttccttttttttgattaaatagtctataaatgtccattatatccagttgattgatggcgttcttaagatcaactatgtccttatgattttctgcctgccaaatctattcatttttgatagaggagtgatatggcttggatgttttgtcccctccaaatctcatgttaaaatatgacctccaatgttagaggtgggcatggtaggaggtgttagaatcatgggagtggatccctcatgaatagcttgatgccatccccgtggcaatgagtgagttcttgctctggtagttcatgtgagagctggtagtctaaagaagtctggctcttcctcgttgctctattgtttccttgcttgctctcttgcttcctcttgcctgctctcccttcattgtctaaaccataattgtaagtttcctgaggcccttaccagaatgagatgctggcaccatgcttcctgtacatcctgcagaactgtgagccaattaaacctcttttctttataaattatccagtcttaagtattcctttatggcaatgcaaagagactaacacagaaaattggtgccaagaaatggagcattgctataaggatacttgaaaatgtggattggctttgggactgggtaatgggcagaagttggaagagtttagagggctcagtcacaggggtggaaggttggaagagtttagaggttggaagagtttagagggctcagaagatgacaggaagatgagggaaaatttaaacttcttagagtcttgttactttgttgtgaccaaaatactgatagtaatatagacagtaaaagccaggctgatgaagcctcaaatggaaacaaggtagttattgggaattaaagtaaagatcacctatgttacaccctagcaaagaacttgacgcgttatatccatgccctgggggtcagaggaagtttgaatttaagagtgatgatctagggtatctggcagaagaaatttctaagcagcaaagcatttcagaagtgatctgatggcagtgagtcatggtagaaccactgcactctgacctgggtgacagagtgagaccttgtctcaaaaaaaagagaagttgcgtggctgcatctaacaacctatggtcagatataggaggaaatgaatgatttaaagttgaaacttacaactaaaaggaaagcatagtgtattaatttggaaaattcacagcctggccacatggtagagaaggaaagagcatttttaggagaggaatacaagcaggctgtggctgcaaaacaaccacttgctggagagatttacatgactgaaagggagtcaggtgctaatatccaagacaaggaaaacaaggtctcaaagtcattttagaaaccttcagagcaacccctaccatcacagaacctgaggcctaggaggaaagaatggtttgggaccaggaccagggcaccactgccctgctctaccagtcacagtaggagactactgcccttatccctgctgctccagctccagccatagctcaaagggccccaggtatacctggggctgctgctttggagagtgcaaaccataagccatggtggcttctatgtggtgttaagccttcaggtacacagaatgcaaaagtgaatgaggctttgtagcagttacttagatttcagaggatgtatgggaaagccctgggtgccaaggcagaagcctgatgcaggggcagagcccttgcagagaacttctactaggtcagggctgagggtaaatgtagggctggagaccccacacagagttcccaccagggaactgcataatggagctatgggaaggggcccaccatcctctagactcaagaatggtagagccactggcaacttgcacccggtgcctggaaaagacacaggtgctcaactccaatccatgagagcagtcatgggggctgcaccctgcaaaaccacaggggtggagctgcccaatgccttgggagcccaccacttgcacagtgtgacctggatgtgggacattgagtcaaggattatgctggagctttaagatttaatgtctgtcttgctgggtgttgaatttgtgtgagacctgttgctccttgcttttgcttgatttctctcttttgaaattggaatgttgactcaatccctgcacaaccattgtatcttggaagtaaatagtttgcttatcttaaaggcctataggtggaagcagctctacttgagtctcagatgagactttggactttgggacccctgagttgatgctggaatgagttgagacttttggggactacttttgtgatgagagaaggacatgagatttggtgggggagtggggggaaaggggctgaatcatatactttggatgtttgtcccctccaaatctcatgttgagatgtaatccccaattttgcaggtggggccaggtgggaggtgtttaaatcctgggggtggattcctcatgaatggcttggtattctcctcaaggtaatgagtgaattcttgctctgagttcacatgaaatctggttgtttgaaagagagtgacacttccccctaccatttcttcctctcttgccatgtgatattccagctccttcttcgtcttctgccatgatgtgctccctgaggctctcaccagaagcagatgccagcaccatacttcctgtatagcctgcagaaacatacatcaaaataaacctcttttctttatcaattacccagtctcacatatttctttatagcagtgcaaataggctaacacaaggagtgtttaatttccaactataatagtgaatgaatttatttctctttacaattctgtccagttttgcctcacatgctttgatgctctgttgttaggtgcatgtatgttaaagaattttatgtccacttggaggattggccactttatcattatgtaatgctgctctttatctctgataacttttcctggtctgatgtctactttgtctgaaattaatatatccactccagctttctgttgatgaaagttatcataatatttctttctatatcccttaaacttaaaaaattttttaatacatatctttttaaaaaaatttttcataagttattggggcacaggtggtatttggttacatgactaagttctttagtggtgatttgtgagattttggtgcacccatcgccagtatacagtgcaacgtatttgtagtttttttatatatatagtttttattatactttaagatctagggtacatgtgcacacaatgtgcaggtttgttacatatgtatacatgtgccatggtggtgtgctgtacccattaactcgtcatttacattaggtatatctcctaatgctatccctccccgccaccgccactccacaacaggccctggtgtgtgatgttccccttcctgtgtccaagtgtcctcattgttcaattcccacctatgagtgagaacatgtggtgtttggttttttgtccttgcaatagtttgctgagaatgatggtttccagcttcatccatgtccctacaaaggacatgaactcatcattttttatggctgcataatattccatggtgtatttgtgccacattttcataatccagtctatcattgatggacatttgggttggttccaagtctttgctactgtgaatagagtcgcaataaacatacgtgtacatgtgtctttatagcagcatgatttatattcctttgggtatatacccagtaatgggatggctgggtcaaatggtatttctagttctagatccctgaggaatcgccacactgtcttccacaatggttgaactagtttacagtcccaccaacagtgtaaaagtgttcctatttctccacatcctctccagcacctgttgtttcctgactttttaatgattgccattctaactggtgtgagatggtatctcattgtggttttgatttgcatttctctgatggccagtgatgatgagcattttttcatgtgtcttttggctgcataaatgtcttcttttgagaagtgtctgttcatatccttcacccactttttgatggggttgtttgttcttttattgtaaatttctttgagttctttgtagattctggatattagccctttgtcagatgagtagattgcaaaatttttctcccattctgtaggttgcctgatggttgctctgacggtagtttcttttgctgtgcagaagctctttagtttaattagatcccatttgtcaattttggcttttgttgccattgctttttgtgtgttagacatgaagtccttacccatgcctatgtcctgaatggtattgcctaggttttcttctagggtttttatggttttaggtctaacatttaagtctttaagccatctcgaataaatttttgtataaggtgtaaggaagggatcaagtttcagctttctacatatggctagccagttttcccagcaccatttattaaatagggaatcctttccccatttcttgtttttgtcaggtttgtcaaagatcagatagttgtagatgtgtggtattgtttctgagggctctgttctgttccattggtctatatctctgttttggtaccagtactatgctattttggtttctgtagccttgcagtatagtttgaagtcaggtagtgtgattcctccagctttgttcttttggcttaggtttgtcttggcaatgcaggctcttttttggttccgtatgaattttaaagtagttttttccaattctgtgaagaaagtcattggtagcttgatggggatggcattgaatctgtaaattaccttgggcagtatggccattttcacgatattgattcttcttttccatgagcatggaatgttcttccatttgtttgtgtcttcgttgagcagtggtttgtagttctccttgaagaggtccttcacatcccttgtaagttggattcctaggtattttattctctttgaagcaattgtgaatgggagttcactcatgatttggctctttgtttatctgttattgatgtataagaatgcttgtgattgttgtacattgattttgtatcctgagattttgctgaagctgcttatcagcttaaggagattttggtctgagacgatggggttttctagatatacaatcatgtcatctgcaaacagggacaatttgacttcctcttttcctaattcaataccctttatttctttctcctgcctgattgccctggccagaacttccaacactatgttgaataggagtggtgagagaggacatccctgtcttgtgccagttttcaaagggaatgcttccagtttttgcccattcagtatgatattggctgtgggtttgtcataaatagctcttattattttgagttacgtcccaacaatacctaatttattgagagtttttatcatgaagcgttgttgaattttgtcaaaggccttttctgcatctattgagataatcatttattgtggttattgtttatggttctgtttatatgctggattacatttattgatttgcatatgttgaaccaggcttgcatcccagggatgaagcccacttgatcatggtggataagctttttgatgtgctgctggattcggtttgccagtattttattgaggatctttgcattgatgttcatcagggttattggtctaaaattctctttttttgttgtgtctctgccaggctttggtatcaggatgatgctggcctcataaaatgagttagggaggattccctctttttctattgattggaatagtttcagaaggaatggtaccagctcctccttgtaactctggtagaatttggctgtgaatccgtctggtcctagacttttttttgttggtaagctattaactattgcctcaatttctgagcctgttattgatctattcagagattcaacttcttcctggtttactcttgggaggatgtatgtgtcgaggaatttatcaatttctcctagattttctggtttatttgtgtggaggtgtttatagtattctctgatggtagtttgtatttctgtggcatctgtggtgatatcccctttatcatttttttattgcatctatttgattcttctctcttttcttctttattagtcttgctagcggtctatcaattttgttgatcttttcaaaaaaccagctcctggattcattgattttttgaagggttttttgtgtctctatttccttcagttctgctctgatcttagttatttcttgccttctgctagcttttgaatgtgtttgctcttgtttctctagttcttttaattgtgatgttagggtgtcaattttagatctttctgctttctcttgtgggcatttagtgctataaatttccctctacaccctgctttaaatctgtcccagagattctggtatgttgtgtctttgttctcgttggtttcaaagaacatctttatttctgccttcatttcgttatgtacacagtagtcattcaggagcaggttgttcagtttccatgtagttgagcagttttgagtgagtttctgaatcctgagttctagtttgattgcactgtggtctgaaagacagtttgttataatttctgttcttttacatttgctgaggagtgctttacttccaactatgtggtcaattttgaaataagtgtgatgtggtgctgagaagagtgtatattctgttgatttgggatggagagttctgtagatgtctattaggttcgctttgtgtgagctgaattcaattcctggatatccttgttaactttctgtctcattgatctgtctaatgttggcagtggggtgttaaagtctcccattattattgtgtgggagtctaagtctctttctaggtctctaaggacttgctttatgaatctggttgcttctgtattgggtgcatgtatatttaggatagttaggtctttttattgaattgatctctttaccattatgtaatggccttctttgtctcttttgatttttgttggtttaaagtctgttttatcagagactaggattgcaacccctgcctttttttgttttccatttgcttggtagatcttcctccatccctttattttgagcctatgtgtgtctctgcacgtgagatgggtttcctgaatacagcacactgatgggtcttgattctttatccaatttgccagtctgtgtcttttaattggagcatttagcccatttacatttaaagttaatattgttatgtgtgaatttgatcctgtcattatgatgttagctgcttattttgctcattagttaatgcattttcttcctagcctcgatggtcattacaatttggcatgtttttgcagtcactggtaccggttgttcctttccacatttagggcttccttcaggagctcttttagggcaggcctggtggtgcccaaatctctcagcatttgcttgtctgtaaagtattttatgtctccttcacttatgaagcttagtttggctggatatgaaattctgagttgaaaattcttttctttaagaatgttgaatattggcccccactctcttctggcttgtagggtttctgctgagagatccgctgttagtctgatgggcttccctttgtgggtaacccgacctttctctctggctgcccttaacaatttttccttcatttcaactttggtgaatctgagaattatgtgtcttgtagtcactcttctcgaggagtatctttgtggagttctctgtatttcctgaatgtgaatgttggcctgccttgctaggctggggaagttctcctgcataatatcctgcagagtgttttccaacttggttccattctccccatcactttctggtataccaatcagacgtagatttggtcttttcacatagtcctatatttcttggagtctttgttcatttctttttattcttttttctctaaacttctcctctcgcttcatttcattcatttgatcttcagtcactgatatcctttcttccagttgatcgaatcggctactgaagcttgtgcatttgtcatgtagttctcatgccatggttttcagctccatcaggtcctttaaggacttctctgtattggttattctagttagccatttgtctaatcttttttcaagatttttaacttctttgtgatgggttcgaacttcctcctttagctcagagaagtttgatcatctgaagccttcttctctcaacttgtcaaagtcattctccatccagctttgttctgttgctggtgaggagctgcattcctttggaggaggagaggcgctctaatttttagaattttcagtgtttctgttctgttttttccccatctttgtggttttatctacctttggtcttcgatgatggtgatgtatagatgggattttggtgtgaatgtcctttctgtttgttagttttccttctgacagtcaggaacttcagctgcaggtctgttggagtttgctggaggtccactccagaccctgtttgcctgggtatcagcagcggaggctgcagaacagcgagtattgctgaacagcaaatgttgctgtctgatcgttcctctggaggtttcctctcagaggggtacccggccgtgtgaggtgtcagtatgcccctactggggatgcctcccagttacgctactcgggggtcagggacccacttgaggaggcagtctgtccgttctcagatctcaaactctgtgttgggagaacaactactctcttcaaagctgtcagacaggaatatttaagtctgcagaggtttctgctgccttttgtttggctatgccctgtccccagaggtggagtctacagaggcaggcaggcctcctagagctacggtggcctccacccagtttgagcttcccgccactttgtttatctactcaagcctcggcaatggcgggcacccctcccccagtctcactgccaccttgcagttcgatctcagactgctgtgctaacaatgagtgaggctctgtgggcatgggaccctccgagcctggcatgggatataatgtcctggtatgtcatttgctaagaccattgtaaaagtgcagtattagggtaggagtgacccaattttccaggtgccatctgtcacagctttccttggctatgaaagggaattccctgacctattgtgtttcctcggtgaggcaatgcctcacccagcttcagctcacgctcagtgctctgcacccactgtcctgcacccactgtctgacaagccccagtgagatgaagctggtacctcagttggaaatgcagaaatcacccttcttctgtgtcgctcatgctgggagctgtagactggagctgttactattcggccatcttggaattgccctatttgtagtctttaatcccttgccccactctcacctttccccccatgtccccaaagtccattgtatcatttttttttgaattaaactttaagttctgggatgcatgtgcagaatgtgcaggtttgttacatatgtatacacttgccatggtggtttgctgcacccatcagtccatcatctatatgaggtatttctcctaatgctatccctcccacagccccccatctcctgacaggccctggtgtgtgatgttcccctccctgcgtccgtgtgttctcattgttcaactcccacttatgagtgagaacatgcagtgtttggcgttctgttcctatgttagtttgctgagaatgatggtttccagcctcatccatgtccctgtaaaggacatgaactcactcttttttatggctgcatagtattccatggtgtatatgtgccacattttccttatccagtctatctttgatgggcgtttgggttgtttccaagtctttgctattgtgaatagtgccacaataaacatacacgtgcatgtgtctttatagtagaatggtttataatcctttgggtatatacccagtaatgggatggctgggtcaaatggtatttctggttctagatccttgaggaattgccacactgtcttccacagtggttgaaataatttacattcccaccaacagtgtaaaagtgttcctatttctccaagtcctctccagcatctgttgtttcctgactttttaatgatcgccattctaacgggtgtgagatggtatctcattgtggttttgatttgcatttctctaatgaccagtgatgatgaactttttttcatatgtttgttggccacataaatgtcttcttttgggaagtgtctgtttataccctttgcccactttttgatggggttgtttggttttttccttaaatttgtttgtttcttgtagattctggatattagccctttgtctgatggatagattgcaaaaattttctcccattctgtaagttgcctgttcatcactctgatgatagtttcatttgctgtgcagaaggtctttagtttaattagatcccatttgtcaattttggcttttgttgccattgcttttggtgttacagtcatgaagtctttgcccatgcctatgtcctgaatggtattgcctaggttttcttctagggtttttatgattttaggtcttatgtttaagtctttaatccatcttgagttaattttttgtatgaggtgtaagaagtggtccagtttcagtttcctgcatatggccagccagttttcccaacaccatttattaaatagggaatcctttctccattgcttgtttttgacaggtttgtcaaagatcagatggttgtagatgtgtggtgttatttctgaggcctctattctgtttcattggtctatatatctgttttggtaccagtaccatgctgttttggttcctgtagccttgtagtatagtttgaagtcaggtagtgcgatgcctccagtttgttctttttgcttaggattgtctttgctatatgagctcttatctggttccctgtgaaatttaaagtagttttttcttattctgtgaagaaaattaatggtggcttgatgggaatagcattgaatctgtaaattactttggtcagtgtggctattttcacgatattgattcttcctatccatgatcatggaatgtttttccatttgtttgtgtcctgttttatttttttgagcagtggtttgtagttctccttgaagaggtcttttacattccttgtaagttgtattcctaggtattttattctctttgtagcaattgtgaatgggagttcagtcatgatttggctctctgtttgtctattattggtgtataggaatgcttgtgatttttgcatgttgattttatatcctgaggctttgctgaagttgcttaccagcttaaagagattttgggctgagatgatagggttttctaaatatacaatcatgtcatctgcaaacagatacgatttgacttcctctcttcctatttgaatatgcttcattgctttctcttgcctgattgccctggccagaacttccaatactacattaaataggagtgttgacagaggacatccttgtcttgtgatggttttcaaagggaaggcttccatcttttgcctattcagtatgataatggctgtgggtttgtcataaatagctcttattattttgagatacattctatcaatacctagtttattgagagtttttaggatgaaggggcgttgaattttattgaaggccttttctgcatctaatgagataatcatgtggtttttgtcattgattctgtttatgtgatggattatgattattgatttgcatatgttgaaccagccttgcatcccagggatgaagacgacttgatcatggtggataagttttctgatgtgctgctggattcaggttgccagtattttattgaggatttttgtattgatgttcatcagagatactggcctgaaattttctttttttgttttgtctgccaggttttggtatcaggataatgctggcgtcataaaatgagttatggaggagtccctctttttctattgtttggaatagtttcagaaggaatggtatcagctcttctctgtacctctgggagaattcagctgtgaatccatctggtcctgggctttttttggttggtaggctgttaattactgcctcaatttcagaacttgttattggtctattcagagattcgtcttcttcctggtttagtcttgtgtccaggaatttatccacttctagattttctagtttatttgcatagaggtgtttatagtattctctgatggtagtttgcatttctgtgggatcagtggtaatatcctgtttatcatttttatggtgtctatttgattcttctctcttttcttttttattagcctggctaacagtatatctattttgttaatttttttcaaaaaccagcttctgggttcattggttttttgaagggtttttcatgtctctttctctttcgattctgctctgatgttagttatttcttgtcttctgctagcttttgaatttctttgctcttggttctctagctcttttaattgtgatttcagggtgtcaattttagatctctcctgctttctcctgtgggcatttggcactataaatttaccgctaaacactgtttagctgtgtcccagagattctagtacattgtgtctttgttctcattagtttcaaataacttctttatttctgccttaatttcattacttacccagtagtcattcaggagcaggttattcagtttccatatagttgtgcagttttgagtgagtttcttaatcctgatttctaatttgattgcaatgtggtctgagagactgttatgatttctgttcttttgcatttgctgaggagtgttttactttcaagtatgtggtcaattttagaataagcgtgatgtggtgctgaaaagaatgtatattctgttgattttgggtggagggttctgtagatgtctattaggtctgcttggtctagagctgagttcaagtcctgaatatccttgttaattttctgtcttgttgatctgtctaatattgacagtggcgtgttaaaatctcccactattattgtgtgggagtctaagtctctttgtaggtctctaagaacttgttttatgaatctgggtgctcctgtattgtgtgcatatatatttaggatagttagctcttcttgttgcattgatcccttaccattatctaatgcccttctttgtctcttttgatctttgttggtttaaagtctgttttatcagagactaggattgcaactcctgcttttttttttcttttcatttgcttggcaaattggtcctacatttctttattttgagcctatgtgtgtctttgcacatgagatggatctcctgaatacagcacactgatgtgtcttgactctttatccaatttgccagtctgtgtcattgaattggagcatgtagcccatttacatttaaggctaatattgttatgtgtgaatttgatcctgtcattatgatgctagctggttattttgcctgttgatgcagtttcttcctagcatcaatggtctttacaatttggtatgtttttgcagtggctggtaccagtttttcctttccatattttgtgcttctttcaggagctctcacaaggcagtcctagtcatgacaaaatctcccagcatttgcttgtctgtaaaggattttatttctctgttgtttatgaaggttagtttggctggatatgaaattctgggttgaaaattcttttctttaagaatgttgaatattggctccctctctcttctggattgtagggtttctgcagagagatccactgttagtctaatgggcttccctttgtgggtaacccaccctttctctctggtgcccttaacactattttcttcatttcaacctaggtgaatctgatgattgtgtcttgaggttgctcttcttgaggagtatctttgtggtgttctctgtatttcctgaatttgaatgttggcctctccctctaggttgggaaagttctcctgggtaatatcctgaagtgtgttttccaacttggtttcattctcccagtcactttctggtacaccaatcaaatgtaggtttagtcttttcacataatcccatatttcttggacactttgttcattcctttttattcttttttctctaatcttgtcttcatgctttatttcattaagctgatcttcaatctctcatatactttcttctgcttgatcaatttggctattgatacttgtgtatgcttcacgaagttcttttgctgttttttttcatctccatcaggtcatttatttcttctctaaactggttattctagttagcaattcctctaacctttttacaaggttcttagcttccttgcattgggttagaacacgttcctttagcttggaggagtttgttattacccaccttctaaagcctacttctgtcaatttgtcaaactcattctccatccagttttgtttccttgctgttgagcagttgtgatcctttggaggagaagaggcattctggtttttggaattttcagcctttttgtgctagattttcctcatctttgtggatttgtctacctttggtctttgatgttggtgaccttcagatggcggttttgtgtggacatcctttttgttgatgatgctattactttctgtttgttagttttccttctaacagtcatgcccctcttctgcaggtctgctggagtttgctggaggtccactccagaccctgtttgcctgggtatcaccagcagaggctgcagaacagcaaaggttgttgcctgttccttcctctggaaattttgtcccagaggggcatctgccagatgtcagctggagctctcctatatgaagtgtctgtcgacccctgctgggaggtgtctcccagtcaggaggcactggggtcagggacccacttgaggaggcagcctatcccttagcagagctcaagcactgtgctaggtgatccactgctctcttcatagcctgcaggcagaaacatttaattctgctgaagctgcacccacagccaccccttcccccaggtgctctgttctagggtgataggagtttttctataagcccctgactggggctgttgcccttctttcagagatgccctgcccagagaggaggaatctagagaggcagtctggctacattggctttactgagctacagtgggctctgccagttcgaacgtccctgcagctttgttaacactatgaggggaaaaccacctactcaagtgtcagtaacggtgaacgccccttcccccaccaagcttgagtgtcccaggtcgacttcagactgctttgctgtcagtgagaatttcaagccagtggattttagctttctgtgctctgtggggtgtgatcagctcagctagaccacttggctccctggcttcggcctcctttccaggagagtgaacagttctgtttcactggcattccaggtgccactgggtatgaaaaaaaaactcctgcagctagctcagtgtctgcccaaagggccgcccagttttgtgcttgaaacccagggcccttatggtgtaggcacctgagggatctcctggtctgtggtttgtgaagaccatgggaaaagcatagtatctgggccagaatgcaccattcttcatgacacagtccttctcaacttcccttggctaggggagggagatccctgaccccttgtgcttcctgggtgaggtgatgccccaccctgctttggcttgccctccgtgggctgcacctgctgtctaaactgttccaatgagatgggctgggtacctcagttggaaatgcaaaaatcacccatcttctctgttgatctcactgggagctgcagactggagctgttcctatttggccatcttgcttcaaatccccattatatcattcttatgcctttgcattctcatagcttaggttccacatataagtaagaacatacaatgtttggttttccattcctgagttactttatttagataataatctccaatcttacccaggttgctgcaaatgccattaattcattttttatggctgagtattattccattgtatcaatataccacagtttgtttatccacttactgattgatgggcatttgggttggttccatgattttgcaattgcaaattttgctgctataaacatgtgtgtgcaagtatctttttcatataatgacttcttttcctctgggtaaatatggagtagtgggattgctggatcaaatggtagttctacttctagtactttgagaagcctccacactgttttctgtagtggttgtactagtttacattcccaccagcagtgtgtatgtgttccctgttcaacacatccacaccaacatctactgttttttgattttttgattatggcaattcttgcaggagtaaggtggtatctcactgtggttttgatttgcatttccctgatcattagtgatgttgagtattttttcatatgtttgttggccatttgtatatcttcttttgagaattctctattcatgtctttagcccattttttgatgaaattgtttgtttttttattactgatttgtttgagttcattatagattctggatattagtcctttgtcagatgtatagattttgaagattttctcccaccctatgggttgtctgtttactctgctgactgttccttttgctgtgcaaaagctctttagtttaattaagtccaaactatttatctttgtttttattgcatttgcttttgggttcttggtcatgaaatccttgcctaagccaatatctaaaagggtttttccagtgttatcttcagaatttttatagtttccagtcttagatttaagtccttaatccatcttgagtttatttttatataaggtgagagatgaggatccagttttattctcctacatgtggctagccaattatcccagcaccatttgttgaaaaaggtgtcctttccctgcttgatgtttttgtttgctttgtcgaagatctttggctgtaagcatttgggtttatttctgggttctctatcctgttccactggcctatgtgtctatttttataccaataccatgctgttttggtgactatggccttatggtatagtgtgaaattaggtaatgtgatgcctccatatttgatttttttttttttttttttttttttgcttgccttgctttggctatgcgggctcttttttggttccatatgaattttagaattgttttttctaattcagtgaagaatgatggtattttcatggggattgcattgaatttgtagattgctgttgacagtatggttgttttcacaatattgattctacccttccatgatcatgggatgtatttctgtttgtttttgtcatctataatttctttcatcagtgttttgtagttttccttgtagccgtcttttgcatccttggttaggtatattcctaagtattttattttattttttgcagctattgtaaaaggggttgatttcttgatttgattctcagcttggttgctgttggtgtatagaagagctactgatttgtgtacattaatctcatatctggaaactttgctgaattcttttatcagttcttggagctttctggaggagtatttagggctttcaaggtaaatgattatatcatcagcaaacagtgagagtttgacttcctctttaccaatttggatgctctttatttctttctcttgtctgattgctctggctaggacttccagtaatatgttgaagaggagtggtgagagtgggcatctgtgttttgttccagttctcagagggaatgctctcaacttttccccattcgtgggtttgtcatagacggcttttattacattgagatatgccccttgtatgccgatttagatgagagctttaatcataaaggatgctggattttgtcaaatggtttttctgcatctgagataatcatgtgactttttgtttttaattctgtttatgtggcatatcacatttattgactcgtgtatgttaaactatccctgcatccctggtgtgaaacccacatgatcatggtgaattatctttttgatatgttgtcagatttggttagttaatattttgttaagggttttcgcatctatcttcatcaaggatatcagtctgtagttttcttttttggttatgtcctttcctggttttggtattagggtgatgctggcttcctagagttaattagggagggttccttctttctctatcttatggaatagtgtcaaaaggattggtaccaactcttccttgaatgtctggtagaattctgctgtaaatccatctggtcctggactttttttttttttttggtaatttttaaattatcattttaatcttgctgcttgtttttggtctgttcagggtatctcattcttcctgatttaagctaggaggttgtgtttttccagaagtttatccatgtcttctaggttttctagtttatgtgtgtaaaggtgttcatagtagccttgaatgatcttttgtatttcagtggtgtcagttgtaatatctcctgtttcatttcttaatttatctgttgtattttgttgttgttgtttcagtttcatttggttctgctctggtctttgttatttccttttttctgctgggcttgggtttggtttgttcttgtttctctagttccttgagatgtgaccttagaatgtcagtttgtgctttttcagtctttttgatgtagacatttagggttattaactttcctctcagcatcacctttgctgtatcccagaggttttgatatattgtgttattattgtcattccatttgaagaatttttaaattttcatcttgattttgtttttgacccattgctcattcaggagcaggttatttaatttacatgtatttgcttggttttgaaggttattttggagttgatttctagttttattccactgtggtctatgtgagtgcttgatataatttcaattttcttaaatttattgaggttcattttatggcctatcatatggtctctcttggagaaagttccatgtgctgttgagtaaaatgtgtattctgcagttgttgaatgaaatgttctgcatgtatctgtttagtccatttgttccaaggtatagtttaaatccattgtttctttattgactttctgtcttgatgacctatctagtgctgtcagtggagtattgaagtcccccactattattgcgttgctgtctatctcatttcctaggtctattagtaattgttttataaatttgggggctccagtgttaggtgcatatatgtttatgattgtgatattttcctgttggacagggccttttaccgttacataatatccctctttgtgtcttttaactgctgttgctttaaaatttgttttgtctgatataagaatagctgcctctgcttgcttttggtgtccatttgcatgaaatgccttttcccatcccgtttacttaaagtttatgtgagtccttatgagttaggtgagtctcctgaaggcagcagatagttggttgatgagttcttattcattctgcagttctgtatcttttaagtgcagcatttaggccatttacattcaatgttagtactgagatgtggggtgctgttgcattcattgtactatttgttacctatttcttttttttttttgctttttgtttttgttttttaacttgtgtttttgttttataggtcctgtgtgatttttgctttaaagaggtcctgttttgttgtgtttccaggagttgtttcaagatttagagctccttttagcagttcttgtagtggtggcttggtcatggcaaattctctcagcaattgtttgtctgaaaacgactgtatctttttttcataaatgatgcttagtttcactggatacaaaattcttggctgataattgttttgtttgaggaggctgaagatagagccccagtcccttctagcttgtaggatttctgttgagaaatttgccattaatctgataggtttttctttataggttacctggtgcttcagtcttacagcacttgagattctttccttcattgtcactttatataacctgatgacaatgtgcctaggtgatgatctttctgcgataaatttcccaggtgttctttgtgcttcttgtatttggatgtttagatctctagcaaggctggagaagttttccttgattattcccccaaatatattttccaaacttttagatttctcttcttcctcaggaacactgattattcttaggtttggtcattgaacataatcctagacttcttggaggctttgttcatattttcttatgcttttttctttgtctttgttggattgggttaattcaaagatcttgtcttccagctccgattttctttcttctacttgttcaattctattgctgagattttctagagcatttttgcatttctataagtgtgtccaatgtttcttggatctctgactttttctttatgcaatctatttccttcaatatttctcccttaatgtcttgtataattttttttatttccttgcattgggcttcacctttctctggtgcctccttgataagcttaataactaacctcctgaattatttttcaggaaaatcagggatttcttcctggtttggatccattgctggttaactagtgtaatatttttttgtggggcgggggtaggggtacggtgttaaagagccttgttttgtcatattaccagagttggttttctggttccttctcatttgggtaggctctgtcagagggaagatctagggctgaaggctgttgttcagattcttttgtcccatggggtgttcccttgatgtagtactgtcctccttttcctatggatgtggcttcttgtaagccaaactgcagtgattgttgtctctcttctgggtctagccactcagcaagtctaccaggctctgggttggtactggggtttgtctgcatagagtcctgtgatgtgaactgtctatcactctcttagatgtggataccagcacttgttcagttggaggtggcaggggtgtgaaatgcactctgtgagggtttttagctttggtggcttaattctctaaagctgattggccttctgctactaggtgatgctttcctgagagcatcagctgtggtagtatggacaggaactggtcatgggcggggccctagaactcccaagattatatgcccttcatcttcagctaccagggtgggtaaggaaggcccatctggtgggggcagggctaggcatgtctgagctcagactctccttgggccagtcttgctgcagctgctgtggggaatgggggtgaggttcccaggtcaatggagttgtgtacctagcaggattgtggctgcctctgctgagtcatgcaggttgtcagggaagtggggaaaagctggcagtcacaggccttacccagctcccacacaaaccaaagggctggtctcactcccaccttgccccaccccacagtccagagtctctttctaggcagtgggtgagccaggcttgagaacttgccccaggctactcgcctcccagctgggaaagaaaatggcttggttccttcccaatctgtggagtctgcacactggattcgtgccctcccccaacttctggctgggaggcttctcacccagttcaaattattacaaagctcagctggagatttccttctccctgtgatgtttttccccactcctctggttgccctcctgatggatccctgtggtgccaggcaggaatggcctgtttggggacccagtgagctctcagtgcctttcttgctgcttcctccacccctgtatttcacttggctctctaaattgactcagctccaggtaaggtcagaaacttctcccacaaacagacctccagtttctccagtggggatgtgttcaggagaggaggatctccctttcccacttctgcagttgggggcacttgcagtatttggggtgtctcctgggtcctgcaggagcagtccacttccttcagagggtctttgtgtcctcttggtattactggtttgttcttgcagttgaactggagctaaaattcacagtgcaagcctctgcatgctgctctgtccctctaagttggagctgcaatctagtcctgcctcccgtccaccatgatgatcccctctcccctttaacttttaatccatatgtgtatttatattttaaatgggtttcttgtatacaacatataggtgggtattgttttttaatccaccttgacaatatctgccttttaacttgtacatttagaccattgatgctcaaagtaattattgatagagatggattaatatctaatgtatttattcctgtttcctattgattacccttgttctttttcctatttttgttttccactcttctgcctttttgtggttttagttaatataattctattttctctcttttattagcatattagttatgcttcttttttcttcttaccttttttagtgctcaccctaaagttttcaatatgcatttataattaatccaagtccactttcaaataacactatactcttcacttgtagtgtgagtacctcataataacaaaatgttcctaattcttccttcctgagccttgtatcattgctgtcattcattttacttacacataagcatatataggcatatatacacatacacacacaaataagcatatataatcaaatatatttctgtgattattttgaacaaaatattgtctgttagatcaattaagaaggagaaaaataaaaactttaattttaccttgaatattgcttctttgatgctttttccttcttcacatagatctgcatttctgacctttatcattttccttcttgctaaagaatttcttttaatatttctctcagggcaagtctgtggaaaaatattccctcaatttttgtttgtctaagaaagactttatttctccttcactttcgaaagataatttcacagggtacagaattataggttggtaggttttttctcttaacactttaaatattcactccactctctccttgattgcctggtgatatggtttggatgtttgtctcctctaaatcttatgttgaaatgtgatcctaagtgttggaggtggggcctaatgggagatgtttgggtcatgggggtggatccctcataaatggctttgtacccttcccatgtaaattagtgagttttcactctgttagttcatgtgagagctggttttctaaaggagcccaacacttcctcctgtctctcactccatctcttgccatgtaacatgccagctccccttcccttccgctatgactaaaagcttcctgaggcctcaacagaagccaagcagatgctggtgccatgcttgtatggcctgcagaaccgttagccaaataaacctcttttctttataaattacccatcctcagatatttctttatagcaatgcaaaatggactaatacacctggcttttgaggagaagttgagtataattcttatctttgctgctttacaggtaagatatgtttttctctggtttccttaaggattgtttctttatctttgattttctgcagtttgtatatgatatgcctaggtgtagtctttttgacatttattctgcctggtgttctctgagcttcttggatatgtagtttgatatctgacattaattttgtgaaaattctcagtcattttttaaaatatttcttttgttcctttcaccctctcttcttctggaattccctatgtgtatgcagcttttatagttgttccacagttcttgaatatgctgttctatttttctgctcttttttctctttgcttctcagttttggtggtttctactgagatgtcctcaaatttggagattctttcctcaaccatctctaatctaccagtaggcccatgaaaggcattattcatttatttaacagtgtttttgatgtctacctagcatttccttttgattatttcttaaactttctatctctctgcttacattgcccatccatttttgcctgctgcctactttattcgttagcatgttgatcattgtttaaaattcctagtctgataattctaattcctgatggatctgagtccgattctgatgcttcctctgtgtcttcaaactatgttttctgctttttaatgtcttgtaattttttcttgatagctagacatgagctactgggtaaaaggaactgctgtaaaaaagcctttagtgatgtggtggtaaggtgtgggggaagggcaaacattctattattccatgatcagatctcaatcttttagtgagcctttgcctctgtactgtaaaactcaaaggggtttcatagtttttccttccttttaggtggcatagaatggctatagtgaactatatttgggtatttcccttaccccaagtcagttaggctctgataaaataggttaggctctggttaaacagtttttcctgagggaagaacaaagtgctctgacttatttcataatgcttcatttcttccttctcctgccaaaagcgcaagataatttttctctgattttccctgtgagaacctgatagagctccagcaggtgaaactcacaaaaatgtggagacccctgatgactgtgtcccctggagttttgtctctcagacttgtccacactgtgcctccggcaatttggcagttacagttcagattttttttaccttggcagttctgcggagattgctgtttgtgggtttctgttctggcaagccacaattctctgcatctacctgtgtgtctctccagttttgggggtagtgatttgccctgtggtcccactttgtcatggatccaagaagagttgttaatttttcagtttgttcatctcttctccctcagctttattgaaggacacttggcaaataaaaatggtgtatatttaaggaatacaaggtgaggtgaaataattactataatcaagctaattagtatattcattacatagtactgatttatttttgtggtcagaacacttaagatcaactctatgagaaaatttcaattatataatacagtaatgttaactatagataccatactgtacatcagatgtacaaccagtgcacaagccagatattctagaactcattcatcttgtgtatctgtacctttgtacaatttgatcaacatctttccactctccctaccctcagtccccctcaaccatccttttcctctctgcttttatattaaacttttgtagatactgcataagtgagatcatgtggtatttgtctttctgtgcctggcttatttcacttagcataatggcctccaggttcatccatgttgtaataagctacagtattttttttgtaaaaggctgaataatattccattgtttatgtgtgtttgtgtgtgtgtgtgtatatctcacagtttctttatccatttgtccatcaacggacacttaagttgttttcatatcttggccgttgtgaataatgctgcaatgaacctggtttgcagatatgaggtcctgactttatttcctttgaatatatactgagaagtgagattaactagatcatacggtaattcttttttttttttttaagatgaagtctcactctgttgcccagtgtggagtgcagtggtgcgatctcagctcactgcaagctccacctcccaggttcacgccattctcctgcctcagcctcctgagtagctgggactgcaggcacccgccaccatgcctggctaatttttttgtatttttagtagagacagggtttcaccatgttagccaggatggtcttgatctcctgacctcgtgatccacccgccttggcctcccaaagtgctgggattacaggcatgagccaccactcccggccccaatcatatggtaattctatttttaactttctgaggaatcaccatactgttttccataatggttgtaccaatttacattcccatcgacagtgtacaagggttcctttttctccatatcttcaccaacacttgttaccttttgtcgttttgataatagacattctaacaactgtgacatgatatgtcacattgtggctttgttttgcattttcttgatgattagtgatgttgaccatctcttcctacatctgttgggtatttgtatgtcttcttagacatgtctactcaggtctttagctcatttatttttaaatcaggttatttgctttttgctactgagttttttgagttctttatatattttgaatattaggactttattatatatgtgatttgcaaatattttctctcatcctgtagattgcctttttgccctgttgattatttcctttgtagtgcagaagccttttagtttgatgcagcctcacctgtctatttttgcttttgttgtctctgcttttgttgtcatatcaaaaaaattattccccaggctagtgtcaggaagattttcccttacattttcttccagtagttttaaggcttcaggttttacagttaagtctttattaattttgagttgagttttgtatatggtgtgagagaagggtctaatatcattattctgcatgtggatatatagttttcccagcaccatttattgaagagaccatcctatccccatagttcttggcactcttgtcaaagatcatctgaccatagacgcatggatttatttctagtctattttgttccattggtctatatgttggggtttatgccagtctcatgctgttttgattactttagctttgtaatatattttgaaatcagtaagtgaaatgcctatggctttgttttttctcaagattgttttggctatccagacagaaaaatcaataagaaaacagaagaactaaacaaaattttagactaaatgaacctaacagacatatactgacctttctacccagcagaagatatacattcttcttaagcacacatggaacattctttaggataggtcacatgttaggtcacaaaacaagtcttaactaatttaagaggattaaaatcattccaagtgtcttttctaatcacaatggaatgaaactagaaatcaatgacagtaaggaaatagaaaaattcacaaatacatgaaactaaacagcgcattcttgaacaaccattgggtcaaagaggaaatcaaaagggaatttaaaaagtatcttgagagaaagaaaaatgaaaacataacataccaaagcttatgagatgcagcaaaaacagtgctaagagagaagtataaagcaatacatgcctacattaaaaaaaaagcaagatttcaaacaacctaactgtacactagagaaaggacaaactaagcccaaagttagaaagagaaaggatgtcataaagagttgtccagcctttcacttgttgttaggatggagtggtgacttccaggttcttacatgctggactggaaaccagaagtctgatatgggttttttttttttttttttgagacggggtcttgctttgttgcccaggctggagtgcagtggcactatcatagctcactgcagcctcaacctctgaggctcaagtgatcttcccacctcagcctccagagtagcttggactactggtatgcaccaccacacaaggcaatttttaaaattttttgtagagacagggtctctttatgttgcccaggctggtctcaaactcttgggctcaagcagtcctcctgccttggcctcccaaagtgctgggattacatggctggcctttaaagctgctccagtgtttaaagattgagaaccaccactctacatgagtcagaattttaatgttgtggaaactcagagataatcttccctatgtggacttggatcttcctgcaggtcaagaagtggctgcaatttaaccgactagctaaccagaggaccagtgtgatagaaaagcaagacaacccctttaagagcattgcaaaatagtaactaacatttatcaggctttagccaattttgactctacatgatttgcccttttgactttgaaacattctgtctataaaagcatggctgtggtactcaaagttatttcacatttcatttggtccgaataacgattctacaaagtgaagactcatgtaaaactcactttgcaactgggaaaactgagactcaggtgagcaaataaacttcactaattactgagtgacattatgcactcaggtcctactactacagttcgaggtcctactactacagttcgaggtcctactacaaattgaggtcctactactacagtttaataaagtacttgcatctctaactttggtggtattttccacaacttctagtacaggactgggcttacaggggatatttattataatttctaaaaagcattttataaaacatgacaagtatttgtaaagtatcttatggtttacaaagaacattcaggtccactctttttctattaaaatgcttgcaaaaattatgaataaatgaatggacacatatagttttgaaatagaatttgggttttgcactagtgtcctttcgaactccctgaatattcaggggaccagtttcatggtctttgtccatggatggcctgcatctccagtccatgtaaaattataccttggttcctcattcccacttccatcctttctagcaaccaacctcatctcatggagtgataaggccactcagaaaacactttgttttaatattgcttttgccactgactaccaaggtgaactttagcaagtcatttctctgggtttcaatatctgtgcatgaaaaaggagaagtctggactagactggtgggcaaatacaaggacagcacatatatctctcctgattgtgcacaagccagacattgctaattggtcatgcaatgtccttcccactatatttggatacactcttagactctttctgaatccagaattccaggcagccattacaaattagccaggattagcactcaagatgaaactgattagtcatcttggcactagatgacattcgagtttccttccagctctgctattctatggttttctggttttaaaagctgggttgcatggatctcatcctgcaggctgttacttgaggatgatcccaaaggtggaactggcagcataatttggaatgaccagagcattcatggggctcagaaatttctctaaaaatttcttagctgtcctaagtttggctgtacattagagtcacattggcagttttttcaaaaattgaggtaaaaatatatcatacatactataaagtggaacattctaatcttagctgtacagtttgatggatttttacgtacataacatctgtgtaaccactaccttaatcaagacatagaatatttccagcactccaggaggagaccttatgttccttcctatcaacacttgaaggtaaccattgttctgttttctgtcaccgcagattaatttcacctgatcttcaattctgtataacatgtgtggtcttttgtgtctggcatcttttgctcaacctaatgtttttgagattcatgtgtgttgttgagtgcattgatagttcttttatattgctgcttagtatttcattgtttgaatatgttacagtttatccattctcctgttgatggatgactgagttacttccaggtttggactattactagtaaagcttctctgaacattcttacacttatcattttgtagacctatgttctcacttctctaagagtgaaattgctgggtctgagggtacatgtagagtcaatcctcattattcatggatactgtatttgcaaatttgcctgtttgctaaaatatatttgtagcctcaaaaatcaatactcatggcactttcacagtcattgatggacatgtgcagagaggtgaaaaatttgagtcaattgatgtgcacattcccagtaagcctgaacatggcaaggccccgccttcttgtttcagtcctcgtgctgtaaactgctgtgtagctagtgccctgtattttgcatttctgtatgtttttgaagagtgatttcactgttttaaatgccagcaccaagtgtagtgctgaagtgctatgtagtgttcctaagcataagaaggctgggatgtgccttttggagaaaatacatgggctagataaactttgttccaggcattagattaatatgaatgttatcaacaatataaattaagtaagaggtctttaaacataaacacatgtaaaacaaggttatgtattgattggctaagtaaagtctttttcttaaatttgagacagtgtctcactctgttgctgctggagtgcagtgctgaaatcactactcactgcagcctcagcctcccgggctcaagccctcctcccatctcagcctccctagtagctgggactacaggcatacatcactgcctctggctaattttctaaaaaaattttggtaaagatgggggtctctatgttgcccatgctggtcttgaactcctggactcaagcaattctcctacctcagcctcccaaaatactaggattacagccatgagccaccgcgcctggctagctgaccaaaatcttgtgatcaagggctggcaggcatctaatcctgcagttcccctaggagcagtggttcagtagtcaccaatttgatgttcactgtgactttatagaacatatactactgcgaataataatagactgtatgttcaactttaatgcctaatagtttactaacatgatcgtatgatctagggagctttaaaaactgcccttggtcaggctatgcctagaccaattaaatttgcatttctggtgggggaccccagggtaggcgtcttcaagctgctcaagtggacccactctacagctgatgttgaccatcacggatcgaaatatagggagagaagacagggaataacaacagagtgcagcctgtgcataaagctgtcactcaataaaaaatggtcaattttacttaatatgctctctttggtttctttttattcaggcttttattctcttttctttacggatggttcatgcacataaaaacatacaatcatggaaaaagcaatctcttgcctggaaaataaatgacaagaactaccctcataccaaggtgaaactcttactcacagacctgggcttgattataaagaacaaacaatggcttggcaaacagaatcacctaccagacatatgaacatttattatcacctatgattctgcgcaaagggagggaggaaatgtctgtgtagtaatcagaaagaaactgcaatggaaaacaaaggagatgattgattgccagatgcgaacgaacagctcgttgtcatcaggaaatcagtatctcctactcacaaaacttgcagggctaatttctgtggtagtctgcacaaatttagccaagaaaatcaaatttccactatcccgagaaggttagctctgttgttgaaattattataatcacttagtttaaggggtgagtttttaagaaccacttctcctttaccaaggcagacagagctgtcaaaggcacccagcttacctggtcctcaggcaccatatgaaggtacttaggtatttacctcccggatggaaaacgccaacctttagcactcagaattgaattggaaattgctgaaggtgtgtctgaattggccagtggttctctaagtgcggtttctggacaaacagcatcagcattaagtgggaacttgttagaaatgggaacatttgggatccactccggtaaggttgtcagaaaaaatacaggatgctcaggaaaacttgagcttcagataagcaataatgacttcttttttttttttctttttgtataagtatgtcctatgcaatatgtgggcctaaatactaaaaataatgttgttcaactgagattcaaacttaactgggaatcctatttttatgtgtaaatctagtaaccctacaccctacaccccagacctatggaatcagaaactcctcggggtgcggctcagtaagttgtggttcaatgagacttccaggtgattctgatgctagctgaagcttgagacccagtgctctagttttagttcccatcttgctattgatgatagctcattatcttgctccctttgtaattcacgttggtcagggccccaattgtaaagtgtcatgaattgacctctccagatacaggtgtgtgcttcagggctcacattccctggtttctggcatctgtgccctttgcagttcactgccgatgcatgagacctctcaccagacaaatggtgaggctgcccgtctctgacccatggcaaccatgggaacaatctcctttgcctccattgctgccacactacagtagctgtttggttttcttacctctaaaagtccaccaaagacttgtgccacctggataaagatatgattaattaaacaatgccatcccaggcctctttccacagcagcaaatgccacttgactataggaacccattaacgcagagcatctgagcagggtaggtcctgagtgaaataattagagtctgcataatggtgataacagtaccaataaccatttgttgatcacttgctctgtacaaagcattgtataagtatgtcctatgcaatatttgtaattaatatttaatcttcatgataactgtgaatgcagaactattttcatcattttaagctaaggaagctaagacttggcaagggcatgtaacttgtttataatctcacaactatttaataggaaatagatgagctaaaacatgaactcctatttgtccaaccccacagctggtgctctaaaccataatggctattgatttcttttgggaagaaagttctgtgagaaccagtgccagggtagaaaacctgaactgtaactgatgaactgatgggagctcagtgtggataagtctgagaactaaaaactccagggggatccagatatgagaggccttcatacttttgtaaattttacttcctggaactctactagattcttacagtgaagattagagaaaaaaaaatcttgagtttctggcatgggtagtcagaatgccagagcattcacttctcaacaaggcctgccctcaagaggaactgttttgccagagcctaacctattggtgtttcatgagagatgaattgacctaggggaagacaaatgccccaccccagctttctttagccatcctgtaccaccctgggggtgaaaaaaacctgagaagcacttgtaaagtgtacagtcaatgattatagtttatatataagtgaaataaatgagagcaatggtataaaggacaggagggagggattaagaatattttattattatgaagtactcacactacttgtgaagcagcatagagttatttgaaaacggacttggattagttgtaaatgtgtattgcaaacttgagccatgactaaaagagttttaaaaatataattgatatgctaataaaaaaagaaaatgcaatcatataaaatgctcaactaatgccacaaaaggcagaaaatgtgtagaaaacaaatgtagaaaccaagagaaaaggcaatgaatagaaaacagcagcaaatatgaccgatattaatccaagtatatcaataataatttaaaatgttaatggtctaaatacaccaattaaaagacagatatcatcagagtggatcaaaaaacaagagtcaactatatgtcctgtataagaaacccactttaaatataaagatgcatatagataaaaagtaaaggaatggggaaagaaatatgaaacaccaatcaaaagaaagatggaggagatatattaacttcagagaaggtagacttaagatcaagaaaagttatcagggataaagaggagcactagtacataatgataaggaagtcagttttccaaaaagtcatagcaatccttaatctgcgtgcgcctaacaacagagcctcgcatattctcactcataggtgggaattgaacaatgagaacacatggatacaggaaggggaacatcacactctggggactgtagtggggtgggaggtggggggagggatagcattaggagatatacctaatgctaaatgatgagttaatgggtgcagcacaccagcatggcacatgtatacatatgtaactaacctgcacattgtgctcatgtaccctaaaacttaaagtataaaaaaaaaacaacaaaatatgtgaggctaaaactgatagaaatgtaaggagaaatagatgaatccactcttataattggtgactttaacattcttctatcagaaatggacagacacagcaggcagaaaatcagtgaggacaatgttgaactcaacagtactgtcaatcaactggatataattgatatctatagattacttcatcaaacaacagcagaacacacattcttctcaagcttacataaaatattcaccaagataggccacattctggccctaaaatgcacattaacaaatttaaaataatagaaataatacaatttaagctctcagacaacaatgtaattaaactagaaagcaataacagaaagatagctagaaaatccccaaatagttggagattaaatatcatgcttttaagtaacatattagtccgaaaggaatctcaagagaaatttaaaaatactttgaactgaaaaaatgaaagtacttgtcaagatttgtgggatgcagtgaaagaaatactaaaaaaaattcatagcattgcatgtctgtattagaatagaagaaagatctaaaatcaacaatctaagcttcctcttcaggaaactaaaaaaggagagcaaattaagtgcaaagtaagaccatttttggtcttatggaaataataaaaattaaagtgcaaatcagtgaaattgaaaagagaaaattaatagaaaaaatcactgaaaacaaaaggtagttcttggaaaagattaaaactgatcagcctctagttaggctaaataaggaaaaaagagagaataaattactaatatcagaaataaaagcaagatattactacagatcccatggactttgaaataataataaaaattactatgaacaactctatgttcatgaattcaacaacctggataaaatgaaccaattccttgaaagatacaatctgccaagattcacataaaaatagacaatcgaataaatttttgcctattgaagacattatatcaataattaataacctcttcaaagagaaactaccaggtccagatgcgttcatcagcaaattctaccaaacccttaaggaagaagttataccaattttatctctcttccagaagataaaaggaaagggaatatttctaactaattctatgatgccagcattaccctaataacaaaacaaaataaagatattaccagaaaactaaagaccagtattgctcatgaacatatcatagaagcaaaaaatcattgaaaaatattagtaaattaaatccaacaatctataaaaagacttatacagcatgaccaagtgggatttattccaggtatgcaaggctggttcaacaattaacaattaattaatgtaatgcatcacatcaatagaagaagaaaatcacaagatcatttcaatagataaagaaaagcacttgagaaactaacaatcattcatggttaaataaaacctctcagcaaactaggaataaagaagaacttccttattttgaaaaataatatctacaaaaccctacagctaacatcatattgaatggtgaggaaactaaaagctttcctgctaagattaggaacaaggcaaggatgttttctcttactactccttttcaacatcaaactggaggtcccaggtaaggccataaggcaagaaaagaaaagaaaaaggtacagattgggaaggaaaaaaataaaacggtctttgctaacagatgaatggttatctggaatctataaaaaaccctcctggaactaatatcatagcaaggttgcatgataccagatacaatcactttcctatataacagcaatgaacaagtgaaatttgagataaaaatactttactatttacattagcacaccccaaaacaaagtacttagatatgaatctaacaaaatatgtgtgagacataaatgaggaaaactacaaaactgatgaaaaaaatcaaagaatgaaagaaacggagagatatgccatgttgatggatgggaaaactcaatatgtcagttccttccaatttcatctataaagtctatgtaatcccaataaaaattctatcaagttattttgtggatatgaacaagctcattctaaagtttgtatggagagataaaagactcagaatagccaacacaatagtgaaggagaaaaagaaagtcagggaactgacactacttgactttaagacttactataaagctatagtagcaaagacagtgaggcactgttgaaagaacagacaaatagattagtggaatagaatagagagcccagaaatagacccacatacatataatggtcagttactgtttgacaaagaagcaaagatagtctttacaacggaggatgctggaataactagacatccacatgggccctcccccaccctcaccaataaaaagaatctagacacagacctcaacaaaactaattcaaccgcaacaaaaactaattcaaatgggatcacagtactaaatataaaacgcaaaactgtaaaacgactagaatacaacataggagaaaatctatatggccttggcatatggtcttgactttttagatataacaccaaaagtataatccatgaaagaaaaaactgatatgctggacatcattaatatcaaattttctgctctgtcaaagacattgttaagagaatgagaagacaagccacagactaggagaaaatatttgcaaaagatatatctgatgaaggactgttatccaaaacatacaaaaagctttcaaaactcaacaagaaaatgaacaacttgatggaaaaacaggcttaggacctgacaaaatatctcaccaaaaatatatacatataacacataaacatctaaaaaggtgctcgacattgtaagttaatagggaattgccaattaaaacaatgagttacccctacacatctgttacaatggtgaagacacagaatactggcaagaccaaatgctggctgggacgtggagcaataggaacacttatttattattgatggaaatgcaaaatgatacagccactgtggaagacaagttgtcagtttctcacaaataatcttaccatacactctagcaatcatgtttcttggtacttacccaaatgagctgaaaacttacattcacgcaacaatctgaatatgaaggtttatttttaactgcaaaaacttggaagcaaccaagatgcctttcagcaggtgagcgaataaataaactgtggtgcatccagaccatggggtattattcagtgccaagaagctatcaagccatgaaaagacatggaggaactttaaatgtatgttattatatgaaagaaaccccaaaagcacacatactatatggatttccaactatatgactgatatggtttggctgtgtcctcatccaaacctcatcttgaactgtagctcccataatccccacgtgtcatggtagggacgtggtggaaggtaatttaatcatggggacagggtttcccagactgttcttgtgatagtgaataagtctcacgagatctgatggtttaataaaggggagttcccctgcatctactctattgcctgccgccatgtaagatacgcctttgctcctccttcaccttgcacaatgattgtgagccatgagaaactgtgagttaattaaacctctttcttttataaattactaagtattgggtatgtctttattaacggcgtgagaatggactaatacaataatactctggaaaaagaaaatctatcagtagtttcccagagttggggggtgagaaggatgggtagagagagcacagaggaattttagggcagtgagattgttctgcatgatactgtagtggtggatacatgtcattatacatttgtccaaacacatagaaagtacaacactaagagtgagccctaatgtaaactatggattttgggtaattatgatgtgtcaacatgggttggttcatggattgtaacacatgcaccactctggtgaagaattcagggagggtgtgcatgtgggcaggcagagggtacatgggaaccctgtactacctactcaattttgctgtgaatctaaagctactctgaaaaataatctatttaaaaaaacaaaacaaaatcagccaaggtgaacttgaacactgaattaatgatgttttacccagcctttggagtgtagaaggctggtatctatgctcaatattttcaacattgaaatacaacatctgaaagacttttataccccaaaatatgaggacaatgacacgtattttcctttattcctcattctttcctaagaaagctagggtagaaaaataaaatgaggagtcacctagtattaacgcattagattagggtattagaaggggatttatcagactgtatggtttatcaatttatgtggacaggggagactagggtcagaactaatatatctgagccatgtcatctgtcttagttttgtttctcctagaagctgagctgagacaaggattcaagttcaaggactttatttgggaaatgaaaggaactccagtaggggagtcaggaagtgatgcaaggaagggaagtgtgttctcaactcagccactgctgtggacaactggagcttgagtttgctgggtaaactgtaagccagtctgcaaaaggctagaagagttattgtattaatattttgaaggatctcaaagtcaaataaaatataggaatcaatctctaaaattaaaatgttttattttggaggaaagaattgcaatttggggcatccttgtaggctggctggtcttcagtatgtccaaagaacaaaggagaaatgttatgtattactctttgagaaatttctttggcactagtaagcttttgaggagctggcaagttctgataggtaagtgactgtggtgggcaaaagtagtcttagttgcagcaggtcatttcagcagccattagataaaattggtttcaggttatggcagggagttcagcagccaggcttgcagagaattacatttttggagcaatgttttgtgccctgagtactttttctcctggcctcttgattctgttttagttgggtatgacaagaatgcttaatttttatgatcagctttcacaagggcaagggagttgggataaaagaaaaagttatcctttaacacttgtctgagttgggggttgagattcctacctgcttcagttgtgtttgtggagatagaaatggcataatgactgtatggaagaaggaatggttaattagctttgtctggggtgtggcggggtaggtcatggaaagcttcgcaaaggagatgatattgaagaggggtcatggtgaaagttttggggtcaagagaggaagggacttccaaacataataagtagcatgtggaaaggcatgggtgtgggaaacagcacagtgagtctaggggacagtaccccatctggtcctctggtcacctggtcttctagtgtggtggaagcctgggcttgagatggggcagggagtcggtggggagggagggatggagagatggaccacagccagtcacagagggtcttatttgtctggattttgttctataagcaagggggtggaattgaagtgtttcaaataaggtcagatttgcattttaagaagaccattttgacgagtgtggagggtgacttagggccacagtggggtggttgttcgggtagagcatgcaggagggacatggaggcagagagactggcagaatgctctgggaagagctgagggtgataagggagcgctgggaggaaaccatgcaggattcatgggataaaggagctccagagagagaggagttgagatgatgttaactcttatttcagcaacagtagcaatgccgtgaggtggttattaacttcttttaacttttaaattttgacgcagtttcagattttccgaaaaggtgtgagattttcttttcctgtttgaaaataagctgcagatgtgatgtctactgcagactgaatgtgtcccccaaatccatgtgtttaaatgctaacccctactgtgatggtattaggaggtggggcctttggtaaatgattaggtcagagagtggagccctcattaatgagactagtgcccttataaaataggcctcagagagcgcacctgccttgtccattatgcaaagacacagccagtaagaaatcaccatctataaaccggcaagagagccctcacctgagaccaactctgctggtgccttgatcttggaatctcagcctccaggactgtgagaaacaaatttctgtttttcataagccacccagtctataatactttgttatagaagccaaaatagactgaaacaatacccctttgcatttttagttattgtttttccctaaaacaaaaattctcttatataaccattgcacaattatgaaaatcaggaaattaaatatttataaaatactattatataaactatagacatgatttagatgttggtcccttatagcaaaaataaataaataaagaaataaaccaagaaatgaaaaaaatcctggctgccgcattgagttctgttgttatgtttctttagcctcctgcaatcaggaacagtacctagactctttgtctttcatctcatgtgtgtgtgtgtgtgtatatatatatctatgtatatgatatatatatatcatgtatatatgtatatatatcatgtatatatatatcgtgtatatatatatcatgtatatatatatattatatatatatgtactacaatcaggaacagtacctagactctttgtctttcatctcatgtgtgtgtatatatatgtatatatatgtgtatatatgtatatatatgtatatatgtgtatatatgtgtatatatgtatatatgtgtatatatgtgtatatatgtatatatatatcgtgtatatatatcatgtatatatgtatatatatcgtgtatatatgtatacgataaatatatgaaaaagtacatatatagatatatatgtatatgtatatatatgtatatatactttttcatatatatatactttttgacatatttgaagtgcacaggcccattgtgttgcagaatctctttccacttgagtttgtctcatgtctcctatgactagattcaggtgattatttttggcagaaacacatagaggtgtgttgtgtcttctcagggcatgtgacgaagtatgtggtgttgacatgtccattatgagggtgatagctttgagcacttggttaaggtggtatctgccaatttcttttggtttaaagtcgctatttttccctttgtcatttataatgacctcgtggggagatactttcagactaggcaaataacccatttttcctcaaacttctaccctgtggtgtttactcttaacacacacttcacagatgaggaaactgatgctcagagaggtggagcaacttgtcgggctcatgaggtcagcaagcaaaactcaaggttcaattttctgactctaggtcagacctcttcacccatgagtgatctctattcctggcttaataatgtcagtttctaaaccatcctttgtgtgtcagacctgccatgccttgcccacatttccttagcccttacacttgaaccttgcttctgggtgcagcatctgagagctcagcatggtcacagcaccagctctgccaccctgtgcccatcagaggtggcacccactgggagcagccctggactagtcagtgacccctcataccactcaggagttgctgtagacattcctcagcaaccttgcccattgtgtgggacgctgtgaggtgtgtgctctacattgtttcccagagagtcccagcaggaggaagctgcagtgcccaccacagggacctgctcgagtgatgtactctcattggcttccttcacatccccctatcacccatccccattagttctgggatcacctcctaactaaagcacatgaatccttctcttggacgtgcctctaggaaaatataaactagggtctttgtgaagttttgtgtttcctctccattctggtcccgcctgtgagccccatatcagggtctctcaaaaatcataagcgccaaaatgagcacagcccccaggtggagtttgaacaggctaggatggagcctgctgagttctcaggagggcacttgaagggtaatcagaggaacgtattcccttgctcaactccagcgagctggagacttccaaattggaggctggatccgattgtatagtcagagacatggttgagaacatgcatatgccagaactgagggcctgagctcactgtagccagcagtggcccttcccatctccctttaggagcaagtgataagaggagtgtgaaatatgaagttggcttgaagctacaatgttggggtacacacatcttttgagctagcatcttaggaggggcttccttgaagcaagccctatgatgacaatctgtgtgcgtgtgtttcattaaggcaggactccggagagaaattgaaaaggcagtagagcaggcaggggagagaagcagcagcagcaagcaagggagtaatttcaggtgatactgtgggcagttctggaatgtgaattgcaccaagagttcgctccacctcaaggccagggagtgaggctttcataccctgcaccagggagggcaggcacatcaactccaaggcacttcttgctttctttgttctgggtcatagttccagcagtgcaagggcattgaagtgggttgcaggtgtgagtgataggagtgaaggctgggtgtagcggctcctgcctgtaattccaacacattgggaggctgaggtgggagggtcgcttgaggacaggagttcaagaccagcctgggcaacatagaaagacctcctctctacaaaaaataaagaattagttggatattttggtgtgtgcctgtggtcccagctacttaggaggctgatgtgggaggatcacttgagcccaggaggttgagatggcagtgagctgagatcacaccattgctgtccagtttgagcaacagagcaagaacctgagtcaaaacataaataaaaaaaaatgtgaagtgcacagaagagggctgggcacccagaactggtgtattagtctggttgggctgctatgacaaaataccacagagtgggtgctttgagcaacagaattttttttctcaccatcctggaggctggaaatcaaatatcaaggtgccaccgggttgatttctggtgagtgtttctctccttggcttgcaggtggccaccttcccaaatggtgcccttatttggcctttcttctgtgcctgcacatccctggtgtctcttcctgttcctatgaggacactagtcagattggattagagtcccaccctaacagcctctttttttttttttcctttttgcctttacctgagaatctaatgctttatttaaccttaattacttctttaaagaagctaactccaaatacatccacattgggggttagagcttcaacctatgaatttgatgggacacattcagtccatgacaaatggtgagaaggctctgaggtcatctgggtgcagtcccaacagtatctatgcagacactttaagctaaggcctcacgaaaccttctttagtaaccacttcacattgtgggttcatagtaagtgttctattacccaaatcctcaacaccagagctgtctccagcctatacctatacagtttaccatagccatgctcttggtctttacccatcttcagggatggagcactcccctagagctgaaaagatctctgaaagagctgaatccatggcttcattttgcagatggaagaaaataaggctggggaaagccaaatgcctccctggaagttggtgtcctcatggtagagttgagctcaccgtccagacctctagactgagcaggggagaaagacctaactttcattgcatgctgcttcttttttatgtgcaaaggaatgtgtagctgttttcccccatcagatttgcatattctcttctggctgccaggggtgcaacctttttctcagggttaatggtatttacatcagtctgagacatcaacaggcgctcaagacccagactttgcaattaagccattccataagcaaagaggagcttatggagctttgtgacaggttgaatatttataagcaggcttatcttaattaagattgctgagtggccaagctggaatgtgttttcctctttcacacaatgtctttcagctgggaggtcactggcggtcaggtttttgggatggtgggtgggggaagatttggcgattgaatgagccacctgcagaagatgggagagggtcagcagctcattcacaggccaccctgaagaacttctcttgagcaatctgtttacttacccagccagctcacgcttaggctggggcttggcactagttattctcttcaaagaagcaatgtgtgcgataagcaacatatgcatctggctatggtttatggtagactctgtctggtaggcatggagctatttcatctcagcagagtcatcttttctcgcttgatccagctggccaaagcaaatggcctgtggaaccaactggtccttgtttgcctgggatgcttctggttttaaaagtcaaaattctatatcctgaaagttctcttagtctggtaggtcactctatttttagaccaagaagagaaatctcattggaatgaaggcccattacaccttggcggactctattttaaaaaatttaactgacaagtaataattgtatatatttatgcggtacagtgtgaggttttgatatgtgtatacttatgaaataattaaatcaagctaattactctgtccatcacctaatctacttattttttgtaagaatatttaaaacctactgttttagtaatttggaaatatatagtacgttattagttgattttcacactgctataaagttactacctgagactgggtaatttataaaggaaagaggtgtaattgactcacagttccacatggctggggaggcctcaggaaacttacaattatgctggaaggcaagggggaaatgagcttggaccttttcaaatggcggcaggagagagagtgttagcaagagtggggaaaactgccttataaaaccatcagatctcgtgagaactcactcactatcgagagaacagcatggggaaaccacccccttaatccaatcacttcctaccaggtctctccataaacacctggggattacaagtcaaggtgagatttgggtggggacacaaagcctaactatatcaagtacattgttattaattgtgcttaccatgctgcctcttctttacagttcagctggaggccaaagcgtttggtttcctgggtgtgaccacctctacctctccatagccattttctccatagacttgcttgaagcctaagggatactccattccctgttttcccttctataatagttctgtggatggctgaggggatggcagaagactaaggggaaagtaaaggcgtaggtgacccagtcattcctgtcttaggggctaggttggctggatccctagactgagaagccaggctgagtgtgacctgtggagacctagaagattaagaggaatggatattgccttgcagggaatggtaagccatgaaatgttttgtaagaaggagtggtacatacaaaatattgctccagaaagcgtttaccttcaggagttgatagagtgggcagagccctgcaggctggagtttatggacatcccagtgagaaagggcatgactcgggaggctgtggaacagcaagtggccctagcctgagtgagtccctgcagtgtccaagaaatgatgttgagatataaccacccaagagaagagacgagggtcagaaaacccaactgtccaagctcaccaaggggagagagcagtgttgcagatgtggttggtgccttgtccatctgcacccaacacttgcccttcatctctccatccaagttgtgcttggtcaaagctgagcagtttgggagataggaccccaatgatgatgctgtttgatggataaatacccccacttcctcatcattgtcccaaggtggggacaactctgagctgtgttatacaccatctcccacagtgtccagcatgactgatgtcagtggcctgcagtggtaacccaataaatcccaggcattggccgccttcccttcctggcctcacatccccctcctctagtggtggtttctgggatcgcctcccaaataagctacttatattcaaattcttattccagggtctgtttctgggggatcccagtctaagacagattaaaaccagacgttctggtattctgcgtctagacattctcctttaacattagacaaatcacaatcactgctctttgaactgtgagcttcagttctttgccattttgggggagcagttctctggatctacttgtccagatgtatacaggtttctgatggtttgctgtatgacgtctcacaagtcctctgcccgttctgggccactgctttcctttgagtgttgtggtgtcttcgggtttttgtaaatcaggacattcgggggcatgctgtgataatcagctttgcactgtttggtagctccgttgatggaagagggtgcatggttgctgtgtggcatttggaggcaaggccagatctagggatggaggataggtggcagcaaagtcctggtcatctcagctggaacttatcatcctttcctcaaaatgttggagatgaattttagtctctccactccagagtttgaaagtcttttactagtcctgactcagttttccaaccaactgacatccctgcccttgaacctagcaccctccataaccatattgtttccctaattgttcacaaagttaagtttgaaaatgaaaagccagcaaggggatgattccaataaaaggaaactgaagaggacttttatgtcttagaaatgcactcatctgcgcatctgagactaataattgttagtgcatgtgcgtaaaagtaatttgttacctctctttgtctcttttttacccctttttctgagcctgactcaactatggctccttggagagggaagtcaatgggactgaaatggttactaataatgggtcccaaagtaggcaatgtagcccaagccagagaaactatcaaacactaaatgggcatcagagaagtcagacaatatgtaaatatggattttgaagatcaaaaagtaattctaagtaaccagaagcattagtattgtcatcattcaggaaacacagttgacgactgaaagacccatggggcacttttcttaggcaaatttagtgccaataatattttgaagcctctttgtaaggtcatagtcaagctcaagtttcatttgagtgtctaaaattttgtgactacagacatcatgaaatcttctctatttctttttatgttccccctggaactatccctattgaaaaggtgattttgaggacaaatttacatcaccaacataaataacattccatctttaattagctttcacgatgggcccaggtggtcctgacagccttttgcatcctagagagcccagaggaatcagagaaggtgtccatcaccaactgttcttggtaacatgcagaggagatgaagatactttccttagggtggtgggaaactttgatgaaggtataaaaagactgatctggaagaggaaaggagttggataaaggtaccagaatgagcatactttcgaatcatactcccttctgcattagatctctagaaattacagaaaagacataaaacacattcattacagctgtagaaaattagatcttgcttttcttggatgtgaaattatgtaagctagaagcgagaggaaatgaggttgaaagtggagttcactgatcaaaacacatgtaggtgagtttttttaaaaggcagaagtagtccaggggtgctgcacaagagtcccaggagagctcccagcttgaggctgtggatgcagagggtgagagggttgcctgaggtcatctgccctggtgactgatgatgtgcctcaggtgcagcctggtggcttgccacctacctgtgtcaagcagcagcagacagaggcattttctgccaggtgtgagcagaaaccatgagtacttgggaaagagaggcaggtaccaggtagctgctgatactgggagttgacaaactactgacacatacatctaagataacatgtcgatacaaagtgtctaccaaacactatagcgttactgtcaaacctggaaaaaagatatcacaatcatcactgccattcaacattatgctaaaggccagtgcaataacagaggtgaaaaggagatatttgaagatgatatgataatttagaaaatctaaggaaatcaagtgacaaattattagaacttagattgctaaaaaggcgtctaatataaaatcaacattaaaaagtcaaaagacttaaacatcagcaataataaattagacaatgtaataccaaataggattccatgaccacaaaactgtaaaatacctaacaaatataatgacaaatgtgaaagatttacacaaaaacttatgaatccttattaaatgtcaccaatagaagtctgagtaagtgaaaacctatactatgtttctatattgtatatttctcaattcttactaaattaatccataaaataccagtgtaattttaagaaagcatataataagtagagtaagtcagccaatttctttttatgaagagcatgacagggttcttgccttgtaagatataaccatgaagctacatgcaacaaattaacagccagatgcataaattgtaactataaaggtagcagaagaaaatacaggaacatttgttagtaatcttgagatagggaaattttcttaagcaaggcacaaaatacagaaggcataattgatagattttgatagactacatcaaaatgaaaacttttatgtaacacttgctggtataaaaccacacattaagacaacttaaataaccagaaaatatttgcaacatatgggagttaaaggattataaaaatgaatgtgactgaatcacaaaattatcatatactccaaagtgcagataaagttatcttctactttatttctctgtgtttgatttcatctcctctataaggcctccataattttgtccactctagtaagtgtaatatgaaccaatgcatccaaaagtttctttagacaatgcggatctcgtttggatgaaatgcccagacttcctccctaagatgcaggggatgtaggaatgaggctgtggcttgtgtggccttgcgatggtaaggacaatggaggattcattgcttgtcttctggatttcccctcatgtccacttcagttcatggattagtgactgcccgggtgcagctggtgtcatgcctgactgcttaatttctggaggcacttagggctgaggttcacgttgatgtcttcgtttctggttcctttcctagctgggccaatgcctatgacccttttgtcagaagcattcaaaccagagtgactccatcttgagtgagggctaggaaaatgaggctgggacttattgggctgcattcccagaaagttaagtatcctagcctctagatgtttatggttaagggaacagattgataacatttactaaacagacccagacttgagagtgtcctaatatcccaatatcttgagaacagaagcagtcctaattttgctttaaagataatattgattcttccaaaatacagtaattaagaaaattaatcctttatcacacacccttgtagcagagcacatctcccatgatctttttttatcctatataaatgagtattgtacctagggtggacgcattcctcctcttatttttggaaacaccctgctctgtctgtggagtagctgtgctttattcctgtactttcttaataaacttgctttcactttattactctgtggactcatcctgaattctgtcttgtgtgagatccaagaaccctctcttggcgtctggatcaggacccctttatggtatcgctttctggctgacccagccccactactgccctcactatgaccttgcctgaggtctatgtgtgtccccaggccatgtggcctgtcctgcagccctcacctgggagctgcttcccttcatctcatgggctgtttggtgtgctcctgtctagccatccgggtacctctgtacctgctcagggctacagggaactctgggttcccttagagcctcaggtagggagtgtcagataaaaatacaggatgcccagttaaattagaatttcagataaacagcaaataatattttagtatacgtgtgttccaaatattgcaggtctcaaatattacattatattagtatattagttatactaaaataaacactgattgtttttctaaagttcttatctaactgggtatcctgtatttttatttgtgaagtctgtcaacactagccatgtgggagccaaaggctgcttggaagaggtgaactcgaggccttccttcttttgcctggctgcctggcacactgcgtcgacttggttgtgcccactccagttaggctgggggctgagcataaggctgcctccttcctctgtctggatagaaagtgaggttgaggttctgctgctttttgctttttcctcgatttatctcctctatgccttcaatccagagcaattaaactaagacattctctttacacaggctattgggacttccccctgctttcctgtctgtctgtgcggactttccttgggtcctctaggctcttaatatgttcaaggagggagataaaggaatttagaaaatctcttctctctccacaaagcctggatttagagcccattatcttgctgtgaattcaaactctactttgaatgtcagtagctgaatattaattcttggtaccactgctatagataattctaaaatccctccctggtcctcaactgcaagggcagtcaaattccttacactgattaggggaaacgctgctagagtataatttcctagaagttggaaatgacttttatacaaatataaagtgaacaggtgtcaaagattttatttagctcattaattattgaaggggcaagtcagttgttagaagagattcaaatcagaatttgagttacaaagagttatattctctttgggacaaaactcatttgcattgttaaggacaggaacaatttacattgctaccagttgtcttcactttaactgctgcccctacaggcatgtaaaatagactaataatggaaagtcaatccaaaggcacaggcctctctagactcagatcatcccagaaggtcccctaggcaatgcccaatactctactgaaagaattctcagggatctcttttgcccatttccacatcttggacaattttttcctgacaaagtataatctcaaaattttttttatcctgttacaatatgaaaagataataaattcaaagaagaggaactataaatggctgacaaatataagattaaatgctcaacctcaccagcctattcatgggaaacatactaaaacaacataagagttttatcagttaatatccaggatggaaagacaaagatttccatgcattgatgttggaagtataaattggttacatctttttggagcacgatttggtagtgtctattgaaattttaaatgtgggcatctgtttgcaattccacttacagatatatcttctagagaaatagtaacaaacatgcaagtgaataacggtgaaagcatcactaattcatttaccaaatattcattaagcacctactttgtgttaagctcagagatgcttggcacatatcagtgaacaaactagccaaagctcctgtttgctggaatgtgtattctcacgggtgcagatagacaataaaaaatataatgaatatataaatcccctagttttttggaagataataaatgtggaaaaaaagagtaagtagattagggtaaggaagaatttgtagtgctgagagttggggtgggagtaggggaacgggtttgggtattaaatatggcggtcagggtagacctcgttgagaaggtgaaatttgaatgaagacttgaaaggagtgtgggagtgagtcatgtaggtgtttgagggaagagcaaaggcaaggacactgaggtgggagtgtgcttggcatgttggagaaaaatcaaggaagccagtgtctgtggatccaggggagggtagcaggaaaggaagttggtgtggataacaggacacccaacttgaggggccttactgggctttgtaaggaattcagcaatctctgtcattgaagtggggagcttgtaaggttttgagcagggaagttacaccatctgagtgtcatgttccccgaatcccgaaaggttgctatgtagataatacatatatggtaggagcaggagggtggacacaggaccagtctagaagtgttgctcctggtctggactagcctattgggccagcagtcgagaagttaaaggtggtcagcttctgcaagtatgtgtgtgtgttttaaatgaattttattgtgtatatacaacatgatgttatgggctacatatagatagtagaataattactatagtaaaacaagttaacgtattcaccattaacatatcacatagttacccacactttttttttggtgacaagggcagcttaaatcttctcatttagcaggaatctcaaataaagtaaaattttattaccttgtaaaccaaaaataaaatgctaagcccctcaatcgactgaatgaaccctcctctctgccaagggctttctgaagtaaacctgaaacactagttcatgtcacatgccacgttgggaatgggttgtcgggcatgtctcattataacttccttcccctcattctaacttccttcctttggaattcaggcagagctgaccagcactaacactaaaacttaagactcataaaacggactctttgtagcaataagatagcaacatgagatagcaggctctggaagaaataaaagtatttaccccaaaatatatttctttgacatattttgaaatggccttgcaaagttgtctcttgtggggaaaatccacattgtgtagagaattccctttcctttccaggtctttttcctgatccaggagagagttaactaagtgtttggcacctttttaaatctgataagaaacgtttacaatgtattctctctgaagcctggtacctgaaggcttcatttgcataataagaaccttggtctccacaaccccttatcttaacccagacactccctcatattgatttcagatctttaaataaactctttcagtcaattgctggtcagaaaatctttgaatccacctgcaacctggaagcccctgcttcaagttgtcctgcctttctgtactgaaccaatgtacatcttacatgtactgattgatgtcatgtgtctccctaaaatgtataaaaccaagctgtagcctgagcaccttggacacaggtcctcagatctcctggggctgtatcacagaccatggtcactcatatttggctcagaacaaatctcttcaagcattttatagaggttgactctttttgtggacaacctgtagtcctcgtgttatacattagatctggaggcttattcatgctacacatctgctacttagagctccccatttcctccccgctacccttgtacccactgttttattctctttctctgtatatttgaccttttttttcttttttttttagattttaggtataagtgatactgcaatatttttctctctgtgtttggattatttcatttagcataatgtcctaatgtcctctggtttcatccatgttatggcaaatggcaggattttcctctttctttctttctttcttttcttttctttttttttttttttgagacagggtcttgctctatcatccaggttggagtgcagtggtgcaatcatggcttgctgcagccttgatctcctgggctcaagagatcctcctgcctcagtcccccaagtagctgggactacaggtgtgtaccaccacatctggctaattttttattttttgtatagacgaattcttactttgttgaccctgtctccatgttgacttactaggctggtcttgaactcctgggcttaagcaatcttcctgccttggcctcccagagtgctgggattacaggcataagccactgcacctggctgattctcttcttttttaaggctgaataatatttcattctctctctctctctctatatatatatatacacacacacacacacataaaaaatatatttatatacacatatacactacagtttttttattcacttatctgttaacggacacttagattgtttccgtatctttctgcaagtgtttcgaaagtagaacccgcatgattttccaccatgtgaatcactgggaatcaaggctgactcctgcgtttttgacctgaacaatctggaaggaaggagttgtctgtcaactcctgggaggctgagggtggagtagagctcctttctggttggtgggggcacatcatcagaagctgagttttgtagaaaagaggttagcaataaagtatttttttgataatagctagaaactgaaaacaagagatcatcaaaagggtaacaattatgtaaactaaggctgtacagaatacagtaggtccacttttcagcatcgcaagtataggggacaaggaagaacatcccccttgccctctgaaggttcactgaagatcaactgacaaaagacaggttaacaggaggaatgacatgcaaatgtgttatcacgcacggggcagggccacagagtgatctccccgtcaggcagtggggtagaaatggctgcataccttcttcttaggggaaagtgggggtagtaaatgatttttagcggaattcagtggtcttaaagaacacacagtggcctgagacaaagtttattgggcctgcagagtagacaatgatttgagacaaaagtctgtccaggtgagttgaaagacttcagtctttcttcctgcgacatgaattcaattaacaaaaactcagggaaggaaccggaggtgactgttttcttctttgtcaggtccagactttagacagatcagggaacttcaggaaacaactccatcctgtgctttaggggaaacagaagattgagagtggcagaaggtcagagaggatgtgaagccttttcttcagttcagcatgtcaaagtgctgtctattaggatattggtttctgggctccagcagaagatctccaaggcacagaattacagaaaaaacaatgttcaatactacctcattcatctgcacactccattgacaacacaaacagaactgtagacttttatatccatagcgatgtagacaggtatcagaaatgatacactttcagcttacatagatttctaacacaatcagcttttaggtagtgctcatataatttaaatttaatgcatagaaaacaaaagagaataataaaaaaccttgtctcaccttggctggtgtcctcatctataaagtgacctgcaaggtccttctgcctccaggaatctgtgctgtgtaacatcaggtgaaccagattattcttggtttgaagccaaggtgtatttactctttgtaaactcatacctggttgtgaccagagaaggatggaatttggcttttccccctaataaagttgggggatcactttgaagtatgactaaaatttggatgtacattggctttcaattgaatttcagacaggggttaaagcaagtggctgcctagaaagttcacacctgtcaacgtggtctcttagaaggagacagtgacatgtgtagtgttcaccatcaagttcaagtcagagagtagtctcatgactgggtggttgaagccttggggcttccttaggaaatgttttctttttactttacatggttgaccaacctgtggtattttatatacatgagttttgtccatggtttcctggcttatcactcctaaaatccttaagatctccaaagcgctgtcttttagagtggcttttgtctgacaggttcacaatgggggctggtcaccagaaagaccaagccaggattagatggttggactttcagccacctcccccaatctctgagaagtggggaaggggctgaaagttaaattaatcaccaatggccaattgtttaaccaaccattcctacttaatgaagcttttataaaaacccaagaggattgggttcagagagcttccagatagctgaacacatggaggttcctggactgtggcaccccgggagggcatggaagctccaggcccctttcccgatggctcaccctatgcatctcttcatctgtaccctttgtaatattctcttaataaaccagtaaatgcaaatttgtacattttctccagctaattaatcaaacccaaagatggggtcatgggaaccccaacttgaattcagccagctggtcagaagttctggtggcctggacttatgactggtgtctgggagacagtcttggggcctgagcccccaatctgtgggatctgacactctcttggaggacacacagctggtgtctgttgcatgtctgttgtgaccaaacccccatacatttggtcacagaagtcttcctgtttgttaatgattgttgtgatgtgacagtagaggaaaaacatggtgggatagagtttcttttctgacataaacccttacacatattcaaatagccaaagacctactgtgccactcccttcctgactgtttcttctgtctccttgcggccactccttaactctctgatcaggttaccagtccctaatcactggctgattggatgtttgaaaagaaggtttggacagggcatgattctgaaggtgaatgtgtttccactagacactcccttccacataccagtgccctttaggacgacccatggtgggcagagcatttcttgcttcattgcaacaaagtggaatttattttaagaagctaagaataaacttaaaaaacatttgataggcatggctgttgacttttgaaaacttcaaattaaaatactttcatttaattttttgattataaaaatcaatttgttttactgaaatacaataacgtatacagtcaagtaccatccagaggtaatcatcattcatgtttggtttatttccttccaacctccctcccatgtatatgctgttaaagaaaaatttattctgacattcattaaaatgctaaggacagccttattcagaactattgtgatcagtgccaagactcacaatagaggagagatggagctcaactctgaatacagcaagggcaagtggggatttaatggtcaatgagcaaaatgaagtggtcagtggatggaaaattacaagcggagacatcaaggatgggggattcttgctaagctgacaggatccttgctgaagacaggccagggtgatacaatatcatgggtggggagtgaggaatttggtcagatattgagtgtgatcagataccaagtgtgatgggaccaaggccaaggctgaggcctcattgagaagagggctcagaggagcctgccggaagtttgggcaaggagagagtcttggacaatgcaatggggacaaatgacatatttatgaaggaccatagttcctcctcccatctctctccacactagcccaccaggcagaactggaaaacagagagaggaaatagcaagaataggatactagcaagccaattgtcttgagaagggtaaagtaagctgagcagaagaaaaaaactccacttgttttgagggtaggagaagaagctgagtcagagaaaaggagtgggaatctggacatgacatgtactttcctcatagtgcctcttgataaaaaagtgagattgaaggtaggggaagtaatatctttttcctgactcctcacggtgttcatgactgagacccctatgacaacagattaatgagaaaaagtcatacaaatttatgaaatataagttttgtgtgtgatgggaggcttcggaaatgatgacccaaagaagcagggacgctgcgtatttttatgcttggatttgatgaagagtagacagttatgcagaagtagaattggacaaagggagcgtgatctagtggtaacaagctgggaggagctgagcaaggcctgcttgttcagattcttcttggcatatctgtgtctttcttccaggcataggacccctctgggattagggttttataacctactttaaataaaggttggaaaattcttttatggcctgcttcagggtagaacagcaagagaaggctagagacccttcctgctccttctgttttgctaaatgccaaggtactatatttcggggtagtgtgatattggaattagtatttgggcttccccagggaagcaccaattttgacccatgatagaatggagagcccattattagtccccaaagaagctagtcttgaactattaaaacacaaatgatgaactcagtgctataagaaaagggtctctgcatttaatttattggtctggttctgattagtcgtgtggccttgagcaaatcacttgcatttctgggcttcacgttccttatcagtgggtaaatgaatgaatggaattggtccatttgtaagcccccatgagtttataaaattagagctgttgaaagggagatctgtgctcagcctttgtctgaggcagtttcaccccctttcacctgggcgactgtatgcgcctttgcagtccttcaagatggcgactggcccttgccatctctcaactcctatgatgtttctggcagagttcctcctgttgactcatcttccaacctcagactcctaagaaagtacagactagtgatgaccaggatgggccatggtggttgaaaatttagagcttggggtagggtcgacctgagggaaagaacatgttaatgagtttatgtgggcagtgagatgatccatgtaatgacaggcagaacttaatgcttcctgctccctccccttccttctctcttcccctcaaggctggcttcccaccagaattgtgctatttaattatctttgctgataaagataaatggcaatcattcaactcctgaatgagtaaaaagagaaatttcacatgagtcacccagggtcttctttcaaacctcactggaaactaagctgtgtttttttatgacttctctgctttgcagggactctaatttcctccactggcgaccattacagtcctttatatagaacagtaaaaacaacatggcacattaacctttgtgaatgacacagtcagaaggtgccttcgtcagcagtgggctctgatgtaaacatggggaagtgagacacagctttggtacagatttctttgtataacttacacccctgtggcctgggtgacacttttaaaagtcacagaaaatgccagctttgtccctccctgttggaggtgggggagagactgtcacaaatggccagtttagagcaggatgtggacatctcaccagttctcatggccttctctgctgccaccccgctctgagccaccaccgcctctcccctggacgattgcaatggctttgtgactggttctccctgtttctgcccccatggtgtattttcaaatcagcagccagaggaatcttttaaaaacatattagattacatcactgttctaggttacccagcctcagctcacactctgagtagaagacaaagtctttccaatgccaaatgggctcaggcagtctgccccaggtacttctctgtcccgactcctggcccacattacctggaagggccttggctctggctgtttcttctgccggtaatattcttcaccagatttctgcaggcccctcccactcccctccttcaagccattattcaaatactgtcttttcgatgggggtctttcctgtcttcctatctgaagatgcaaacttatctcccacactctctttcctttttcctagcacttatcaatgtcttacatgcaattttcaaaatttaaagcaaaaaaatctgctggttacttccaaaatcaccagtttcatatctctagttaaataaataaatactatatgtaacattattgttattatttaccatttatctctcccaagtgaaaatatgctccttgaagatgggaatttttgtctttgttccctacttttgggactgtatcctttaggtcagggattctccaactttcatatgcccgggaatcacctgggggtccttttaaaaaatgtagactctaattggtagctttgggatgagaactgagaatttgcatctccaacaagctctcaggtgatacttgctattgaatgaatctgggttctgcccgcccaatgccgcaaactcaaacactgacatcgggatttcagtgagagaaaatgaggcatttatggtagggcactaagcagggggaatggggctgctaaagcctaagacccaaattcccggagggcttacagataagggtttctaaaggtggggaggcagaggtcacaggaaaagtcatgagtcaatacatggaggctatgcattgctttgacctagaaaggcaggacatcttgaagcaggggcccaaaggtcataggtggagtcaaagattttctgatttgcaattggttaaggaggtgaagctttgtgtagaaagtttaggatcagcagaaaagaatgttagctctggctcatgggtgtgtcctcctccaggcctttcaggaagaaatttagaacaaaggacagcagtgacagtttccagtcctcagtttctccttatctgaggtctgtgtgccagtggatctgtttggtgtagatcaagatttctgaaaaacaactcagggacatactgatatggtttggatctgtgtccccacccaaatcttgtattgaaatgtaatccccagtgctggaggtggagtctggtgggaggtgattggatcatggggctggtttctcatggtttaacaccatccccacttggtgctctcatagcgatagtgagttctcgtgagatctgattgtttaaaagtgtgtggcacctcccctcctctctctccctcctgctctggctatgtgaagtgctggctccccctttgccttctgccatgattttctgaggcctcaccagaaactgagcaggtgccagcatcattctttctgtgcagtctgcagaaccataagccaattaaacatcttttctttataaattactcagtctcaggtatttccttatagcaatacaatggactaatggactaatacagaaaattggtactaagaagtgagggcattgttataaagatgcctgaaaatgtggaagcagctttgaaactgggtagccagcagaggttggaacagcttggagggctcagaagaagaaaggaaggtgagggaaactttggaactttccagacacttgttcaatagttgtgaccacaatgctgatagtgatatgggcagtaaagtctaggatgaggaggactcaggtagaaatgaggaacttatgattgaagcaaccattgcaaaattataactgagaaaattattacagtaaaatagatctgacctaaccaacttcatcttgcttctaacctccaagctgtccttgttcactcctgggcataggccgaactaactgtgggaggaacttatagtttaattttgaagcaaagataataacagccctttcccaaaacaaacccccttcctgcctggggactagactgcctttgtaagactaacaaattacctacaagataagaaactatggtttaagaatcatacagctggaggctataagattctgaccctccccaaagtgctcctggggataacatcactattgtaaaacctatgatcagtgattgagatattgatagatcagctggaaccacccagattgataaactggctcatctgatcttgcggcccccacctagaaactgactcagcaaaagacgacagctttgattccctttgactcatctccaacccaaccaatcagcactcccaactcactggcccctctgtgccaaattatcgttaaaaacttcaatccctaaattctcagggagactgattataaaactccagtctcccacagaggtggctctgcatgaataactctttctctattgcaattcattgtcttgataaatcagctctttctaggcagtgggcaagacatgagttttgggaggggccggggacagaatgataaggtttggccgtgtgcctccatccaaatctcatgttgaaatgtaatcctcaatgctgaaagtggggccttgtgggaggtgattgtatcatgggggcagttttgtctcatggtttaacagcatccccccttggttgtcacgatagtgagttctcatgaaatctggtcgtttcaaagagtgtgacacctctccccacttcctcctgctccagtcatatgatgtgccagcccccttcaccatctgccatgattgtaagtttcctgaggctaccccagaagctgagcagatgccagcactatcttccctgtacagcctgtggaaccacagggcaattaaacatcttttctttataaattaccccttctcagctatttctttatagcagtgtgagaacagagtaatacacacgttaggatgttacctttagtttccatagggaatcaaacatctagtgactctaacttccttggctattgtttcaagctattattaccttcttgcatatcaagttgctctcagggctagccaggtgtctggaatttcccttgaaggaactcaagattttcttttatttccatgcttggagggcccgtagcctccaagaggagtccctgttgtgtctcacagtgatttggaacagcaaggctgaagaccatgtggtttcatgcctggaggcaggactgctagttgttttttttttttttttttttttttttttttgagatagagtcttgccctgtcacttaggctggagtgaagtggcgcaatctcagctcactataacctccacctcccagtttcaaacaattctcctgcctcagcttcctgagtagctggtattatatgcacgagccaccatgccttgctaatttttgtacttttagtagagacagggtttcaccatgtgggccaggctggtcttgaactcctgatctcaagtcatctgctggcctcggcctccttaagtgctgggattacaggcatgagccaccacacctggccccaccagttgttttctttccaaagtcaagttcaaaaacccagggctgagttgatggtatcagtcacatgggagagctttaagttacagattcctggctgtctacctcagagtttgtgatttagtaggtcagaagagggacctaggaatctcagtttttttttttttttttaaagttcactgggtgatttggatgtgcagctgggatgggtaaccaatgatacggaaaaataaagaatttcttacatatgcaaatctgatgctagttgttgccaaattgtcatctagtcggtacaaaatggaaattggcatctcaaatgaaaataaaaaaatatcttttttcttgttggcatcatttggttggcttccaaaaatttaatgatttcaacagagaaaaagggaaaatgtgtataatcatttcagaacatccctattcatcactttaaaattctatttagtattatgaaaatagcacaagcatatagaaaacagttcaaacagtaaaaagatatgcaatgaaaagtgagcttttcttctattttggacttccagtctcattctttggaggaaatttttgttaacaatgtcttatcaatatttccagaaaatttctaggtacatacacacacacacacacacacacacacacacacacacacacacacacacccctacatattttttctttgtgaaagcaggggaaatgtgaccaaactgtttgtaccaggctttttcttattactgtgtgtcttggttagccatgtatggaaaagtgtatttttaccctgagatctaccatttcccaagcccctgccacccctcccattgagaggtgagatttatggctctttctttcgaatctgggtgggctttagactatgttgaaagtgatactatgtgacttttgaggctaaatcatgaaaagtaatacaactaccacctggtcctcttggcattctcactcaagaacccagctgccatgctgtgaagatgtagagagacgacatggagaagtcatgtttaggttttctcgccaacagccctagctgaagtccaagccaacagtcagcatcaactttgggaaatgtgagggacaaacttgagatgattccagcctccagccttcaggccactccactgtggaacacagatgaactgcaaaggaattggagacagaatgtcctgatcccatttaagggctcacagcaggatttacaggagggtggtataacctgtgtgtcattcatgggtgatcttgagccaatcactatgtgttagtttagctagtctaggcaacactgcaagagcaaacaaatcttcatatctcccaacttcacaacatacacgtttatttctcactctcattgcaatcccatgagagtcaggcagctctctttcctatcataacttagagatccagtttccttctctgtggtgtctcttctatctttgagaactttcttggaatcctttattgtattctcttcatttggctggcctaagagtggaaaaagagggcatggaaaaatcacatgggaaattatatggcttggccttatatgaactacatcagttctgcccacaatccagtgtggcagacaaaaatatatggccccctcctaactgcaagggagtctgggaaatgtagtctttttgagtacctaggtagaggacacaaaagtggtgggtgtctggccagtttctgccgcaccatgcctcaatttcctctctttagatgagaataataatgaagtcaacctcctcaggttgctgtgaagatcaaactataagaaattgtcttatatctgaagttgaatggactagacgcattttaggtattatggtatttcccatcagagaaagatacctgagacactttccctcaacagtccaggggccccataaatgatgaacaatgataggccactgttccttccctgggctatcctaaatgtaaccactggcaaccactgccctaatgccaatgccgagaatgcttctccccccacgggtggagagagtaacgtgttacaaaagcagcccacccacgttctattaggctcagagaaaagactcacaggaacacagctggcccctcaccagacaacattcaagtgggacattaagcagagatacacttgttctttttctctccagctttgtaccacactgatggctacccatgctctctttccacagcagcatatacatttcagatgaatgagagcaagagaaaatattaagttaaagacccgggagcaaacattggcaactctcttaggatctggtggttcacagtctttcttgtccattccctcagtaaaaatatttaagttctggaaaatctcaatcttctcactggtaaaatggggatgataatgatatctgagctgcagagcatacacagttgtggggaggatcaggtaagggaatgcttaaaaagggctttgtaaagtttataaactgccctaaacagaggtgagtataatggctcaatcatgattcacagcagtctcaaactcttgtgttcaagcaatcctcccaccttagcttttccaagttgctgggactataggcataccccaccactcctagctaatttttctttcttttttctttctaagcctaacccccttcttttttttttttttttttgagatggagtcttgctctgtcacccagtctggaatgtagtggcatgatcttggctcactgcaagctccgcttcctgggttgaagtgattctcctgccttagcctctggagtagctgggactacaggcatgtgtcaccaagcctggctaatttttgtatttttgatagagacgaggtttcaccatgttggcctggctcaaactcctggcctcaagttatctgcccacctttgactcccaaagtgttgggggtattacaggtgtgagccactgcggctggacagcttaactcccttctaagtctaacccacctccttattccttactggtaggggggtccactgcacggtcaccacatccgttatttcattctgggtcctgaactttcagctgcattttttttttttcagagaggagtctctctctgttgccatattgctcttgaaaccctggggtcaagcaatcctcctgcctccacctcccaaaatgctgaaattacaggcatgagccaccaaacctggccataatcatcccttctttatacccctcttcccactaccttttctctgattataaaatttctgtataaatcttggaaaagatgagaaataataattataacttctgcttactgaataatttctatgtccaactgatttgccctcatggacgggtggtacagttctgccctcttacttggatagcagacagctgagcaggcctgtgagattccaggttgtgaagccgcttgcttaatctgcctatttccaaaggaagtagctcatcagtttcacgacacgtgtcaagggccttaaaagcatccttttcctttgaccctgtacatttcctcctaagaaacttccttaaacacacagtctttaccacagcccaggtttatggccaaatattaaaagatggctgcttcagaggtatttataaaagtaggaaattaaaaatttaaatgtctgtcattaaggtaattggtaagtaaatcatggaacattcacacagtgacatgttttatgacctctaaggctcgtatttatgttatacttctaatgacatagaaaattgtttattatgtaaaggttcacaggatgggcaatgctacatacagttttatgtcaactgtgctcaaaatgtatagaataatagcagggaagaaacaggccaaaatgaactgtattggttttgggtggtagaattataagagacttatttttctgtgtgtttccctcccctacaccgcctcccgctttcccataccttaaaaagtttctacgtggagcaagattagaaaaaaaaaataaattaaaatggttaatataaagttcaaaatcccccaaatctcactctcaaactgacattccctatcttaactctctttgtctcacctatttagtttcatttacttttccttataaatgcgtaggttgccactgatgcgctcagaatgaggtgaaattcaattcaaaatacataaaaaccacagccacccactcactaagccttcatgtgccaaggaatattcaaaggaactgagacgtaagtggttctcatattaaattcccaccttcagtcacaagttagggagcacagttgaatgttttttataatactaaacatatcttttgcaaacaagagtaagagaaaaagaacgtttatcatgaatccaattataactgcagccttttagaaatgaactgctgcaaagaatcaggtcaatgaagagagtacaagtttgccgaagatacaaacagctttggtttcctttagaacttgacaattgctgttaaggctcagaggagtcttgtgtgagtgcagactgaatattccttcaaggatcttgcttggaggatagtccatgaaaactacagccaggatttccaaacctcgtcagaagaggaatgcccatagggggacttgttttcaggatcatcttgtctagcttatctgttcgtgctggctacccccagagccaccttgaagttaaataacatacagagtgactgctgagcagaagccaatgaagtatgatgtgtattaaatatcattcaatgtatccatttgtgccagaaacaaaggcaagagtattacttatttctaagcgtcaatattttatgaggccttgcagagcccttaacaactgggaccctacacatatttactctacatcagaagatgagtcaagtgtagacttcgtttattagaaattgtctcaaaactcaaaatgttggttttgcttggggtgtggactcagtgaatgctcttggtgtttgctgaccctgacaacctcagagacatccatgctcaaaataaatctccagattgagcactttattgctttctgatcttttctgattaatagctgatgtcagtccatatatcaagtggggctggtgtttatcacgtggccttgaactgttttgggaacagaagtgtttgctaagtaggatgttatatatgagatagtgtagctttgagactcaaccactgtttacttggtttggtaagactaccatttccttgcctctctcctcctctgcactcacaaggggttcaccagctcctcttaccttcctgggctcgttctcacatttcccttgctgtctgtctgaccggttctggttaaggcactgcctttcttgtttgaagcccagaatctgtgtatataagttattatggcaggttctgccatgtttcctgtcatgaatttcctgctatggtgacctgatgtgtacccctgcacactcttaaacctggaaacccactctgctctttcacgatccctgccagatatttaagccctgccctgaaacccgaggataggcctttcaggtgccaaccacttctaagtctaacccacctcctattcctttctggtgggaaggtgcataaaatggtcaccacatgtgttcttttattctgggtccccacaatgaaatggctgcatttatgaaattcagcctaccctggggacagcttcagggagatactcctccttaagaagatgctttgtagatgactcagctccactcctcagatccaagagatgacattgactaactcaagtgactgctacccagaagctggtgcaagttgaaaagtggaccttcttgggcagcttccaatgatagcagcttgtgttcactctgtgtgagtgagactgaaacaacaagattcagaagaagagctagatctccttgcatgaaaggaaggtcattcaggaaagtaaacaaaattacaagggtagttttacagcctctgatgatggggatggtactgccaaatatcctcactaatatcatgagattgtatagtcaactgtgaaattgtccaccttcctaaatagaaagacaaaatacagattatctaaggagactccttcctgtgtggggaagctggatcatatggcccagatctgttctcccaaaactaaccttcttggagctttctcatttatgttctggctcaaatgggcatatagccctttctcttaatagtgtaattgagaaaagactgactttccataaaggcttctgggttgcaaaatggacgtgcacaccaaaaagaaccataaattagaaaatctgactgtaaggtacagtagtttttaatttttttttacatttttaattcttggcttggtatgtttgacagagggtgcactcttcttaggccttggcttgctgctatattggaccctggatagaggttgggaagtccatggatgaattttaccaaggtccacgggtcccctgagattgtaattgaatgcctttgtgcctatttattttttgggaatagagttcatagctttcatgatattctcaaagatgcttttgtattcccaaaatacaaagatattataggcatcttagttataggcatttagttatatgcatcttagtccctataactgaatcccatgtacctggtcatctccactattcaaagacaagaaagagaaagcaagaaagcaagagtcagtggatggaaactccctccagcttccttccttgggtgatttactccaagaatgattacttttttcaaggtgggccaacccgtgctgataatcaactcaaaatacaactccaataggaatagcatcccaacatttaggatcatgttctattatagggccaacctctacccactctggaaaatattccatataaatcaaagttcttcattttatgctctaagacagggaacaattttcttgcacatcttttcttcctggacctcaaatgaattgggtttttagaatgtcaagcaaattttgtcttgatagacactcagtggggagaactttaatctgttgtatgttctcagaaggttagatcaattaatattgtagaaacaataccgcatgtagtctcagggatagctgtgaatataaaatgagacattagcttaattacccccaatgaatggcttattgtctttgccagcaaatatggctcatgggtaattggcaaaatcacacagatgaatctccaaagaatccatgttgggctattaggggatcagtggcaaaaaacactggtttcagtttgattgatcagatgttgatagtaaatgatggagtcattgtgaactaaaatgacagtttggatgtcctttggaaagaatactacccttggaatggagaggccagagttctggagctgtattgggcacccaccaggtgtgtaaacatagataagtcacctggtctggctggatgcctgtctgggttctcatctgtagaaagagtctccctaagagcagctttgacttctgtgagtctattggctgtacaaatttgagtgactctgaaaaagtcttggagagaacaaatggccttaaatgttggtaaaaagagcaagtgacagaacaattgtactatgagttgggggttgtactaatataggtctcaaacaatggtcaatttaaaaaactgttgggacagtgatgatcttaattcactatctgagatgttcaagtgggcatttctgaatatatcaaatgattgcataatttcccacatatctttgtctctatcaggcaagcaaacttgaattgatccccagaacaagaaagaatcataaacacatttattaattagcatcacattttttttattatactttaagttctagggtacatgtgcacaatgtgcaggtttgttacatatgtatacatgtgccatgttggtgtgctgcacccattaactcgacttttacattaggtatatctcttaatgttatccctcccccttcctcccacccccaacaggccctggtgtgtgatgttccccttcctgtgtccaagtgttctcattgtttaattcccacctatgagttagaacatgcagtgtttggttttttgtccttgtgatagtttgctgagaatgatgatttccagcttaatccatgtccctacaaaggacatgaactcatccttttttatggctgcatagtattccatggtgtatatgtgccacattttcttaattcagtctatcattgatggacatttgggttggttccaagtctttgctattgtaaatagtgccgcaataaacatacatgtgcatgtgtctttatagcagcatgatttataatcctttgggtacatacccagtatgtggtattggaaccactctctccttcactcatggcagtgatctgaagtaacaggtgtacattggacaactgtgaagtaaattttaggcttatagttcctgggaggattcagattcactcaacttctgccctcagggacaaggcacaaggtcctaagccagtgaaatactattttctaaatagctctagattggggcctgagtggcagacatgtggaatgattttcatttgcagatgttgctcagcagtttaagcaacctccatcagtcttgccaattatgcacatcttcctcccagctctaacttgataatttattgtttccaaaacctgaagcaatcctggctcagtggtgatttagcaaaagctgagtgtcttcacttgaaatgtctaccagcaaactcagatttgagccccggaaatatttttgatggataaaatttacagtaatcccattcaaactgtgatccaacagaaggcaccatttataagtatttaccaatgggactaaggagagcagagtacagaacaataagaagacatccaactgaaaataaatgcagtcatcttatccctcatgggttgaaagttttgcttagactcagccagtgacctgagaaatttttggctagaaaggtggtacatcaaaatgtttctgagtaaaataattttcagcaaatattgttgtcaaacataagcattgtactaagcaggacacaaatgcaaatcaggtacagatattctatcataaacgagcttaagggggagatgagttcataagtaaccagaacatgtagtgctatgggtaggaatatttgagagggaggaaagagtcagagccatggaacagcggtagaaaatgctagatgtgcacaggaaactgtaagcttagcttggttggaaactgggctgaaagaatagactggagtcagaagcagttcatgttgcttttcttaccacaggctggaatgacattaaccttttgaaagctaacacgttggcctatcatatagagcctttggactgttggaggcctctggtagtcaggaggtccccaggaggccatatcccagctggattgtctttcaatagttttgagatactcattgaacacctgcgtaaaagtattctacaaggccttacaagaaatgctaaaaagaatctcttctaagaatcttgaagtgtagaaacagttataagtatcttaacagaggtccaaggaaagacaaaatagacactgaaggggcatttggtgaatgtcagtatctgtttcttttataataaaactctttgaactagaaagagaaggatgggtctttaatttgataaaggataattatggggggcattcactgttttggatcattctatatactttaaaattgttttataactttttatttcaataggtttttggggaacaggtgatgcttggttgcatgaataagttctttagtggtgatttctgagattttggtacactcatcacccaagcagtatacactgtatccaatgtgtagccttttagcccttgccaccccccatcctttcccccaaacccccaaagtccaatatatcattcttatgcttttgtgtcctcatagtttagttcccacatatgagtgagaacatacaatgtttggttttccattcctgagttacttcacttagaatgatagtctccaatccatccagattgctgtggatgccattatttcattccttttatggctgagtagtattccatggtgtgtgtgtgtgtgtgtgtatatatatatatatatgtatatcacattttatccactcaattgatggcatttgggctggttccatatttttgcaattgcaaattgtgctgctataaatgtgtgtgcaagtatttttttgtttaatgacttcttttcctctgggtagatacctagtagtaggattgctagatcaaacagtagatctacttttagttctttaaggaacattcacaatgtttttcataatggttgtactagtttacattcccaccaacagtgtaaaagtgttcccttttcgttgcatccacatcaacacctattattatttttatttttttcattatggccattcttgcaggagtgaggtggtattgcattgtggtttgatttgcatttccctgataattagtgatgttgagcatttttccatatgctttttggacatttgcatatcttcttttgagaatggttaatgatttattcatgtccttagcccactttttgatgggattgtttgatttttacttgtttatttgtttgagtctcttgtagattctggatattagtcctttgccagatgtatagattgtcaagactttctcccactctgtgggttgtctgttaactctgctgattatttattttgctgtgcagaaggtttttagtttaattaagtcctatctatttatctttgtttttgttgcatttgcttttgggtttttgttcatgaagtctttgcctaagccaataactaaaaggattttttagatgttatcttctagaatatttgtggtttcaggtcttagatgtaagtctttgatctattttgagttgatttttgtataaggtgagagatggggatatggtttcattcttctacatgtggctagccaattatcccagcaccatttgttgaatagggtgtcctttcccaactttatgtttttgtttgctttgtcaaacatcagttggctgtaactatttggctttatttctctattctgtaccattggtctatgtgcctatttttacaccaatactatgctgttttggtgactgtggccttatggtatagtttgaagtcaggtaatgtgatgcctccagatttgttctttttgattagtcttgctttggctatgtgggctcttttgtggttccatattaattgtgtgtgtgtgtgtgtgtgtgttttttcggatggagtctcacactgtcacccaggctggagtgcaatggcatatcttggctcactgtaacctccaactcccaggttcaagcaattctcctgcctcagcctcctgagtagctgggattacaggcacccaccaccatgcctggctattttttttgtgtttttagtagagacggagtttcaccatgttgaccaggctggtctcgaactcctgagctcatgatccacccgccttggcctcccaaagtgctgggattacaggtgtaagtcacgtgcctggccccatattaattttaagattgttttttctagttctgtgaagaatgattgtggtattttgatgggaattgcattgaatttgtagattgctttggggagtatggtcatttttcacagtattgattctatccatccatgaacatgggatgtgtttccatttgtttccatttgttgctgatttctttcagcagtgttttgtagttttccttgtagaggtccttcacaatctttgttaggtatattcctaagtatttcattttttttatgcagctattgtgaaaggcgtcaagttcctggttcgattttcagcatggtgactgttggtgtacagcagagatactgatttgtttgcattaattttgtatcctgaaattttgctgaattcatgtaccagttctaggagctttttggataagtctttagggttttctaggtatatgatcatatcatctgcaaacagtgacagtttgacttcctctttcccaatttctttctcttgtctgattgctctggctatgacttccagtactatgttgaatacaagtagtgaaagtggttcatcctcatcttgttccagttctcaggaagaatgcttccaacttttccccattcagtataaggttgactgtggttttatcatagatggcttttattaccttaaggtgtgtcctttctatgccaattttgctgaaggttttaatcataaagagatgctggattttgtcaaatgattttactgtgtctattgagatgatcatgtgattttgttttaaattctgtttatgtggtgcatcacatttattgacttacatatgttaaaccatccctggatccctggtatgaaacccacttgatcatgggacattatgttttttatatgctgttggattcagtttgctgatattttgttgaggatttttgcatctatgttcaccagggatattggtctgtaggtatctttttttattatgcccttccccagtttttgtattagggtgatactggcttcatagaataatttagggaggattccttctttctctatcttttggaataatctcaataggattggtaccaattcttctttgaatgtctaatagaattaggctgtgaatatatctggttctggacttttttttcttggcattttaaaaaattactgtttcaatcttgctgcttattattggtctgttcagagattctacatcttcctggtttaatctaggatggttgtatatttctaggaatttatccatctcctctaggttttctagtttatgtgcataaaggtgttcatagtagccttgaataatcttttgtatttctgtggtatcagttgtaatatctattgtttcatttctacttgagcttatttggatcttctctcttcttttcttggctaatctggctaatggtctatcaatttttaaaaatcttttcaaagaaccagcttcttgttccatttatcttttgtattttttttttgtctcaatttcatttagatctgctctgatctttgttacttcttttcttcttttgggtttgggttgttcttgtttctccatttctgtgaggtgtgactttagattgtgtatttgtgctcttccagactttttgatgtaggcatttaatgctatgaactttcctattagcaatgcttttgccgtatcctagaggttttgataggttgtgtcattattatcgttcagttcaaagaatttttaaatttccattttgatttcacttttgacccaacaatcatcaagaacatgttatttaatttccatatatttgcattgttttgagggctccttttggagttgatttccaattttattccactgtagtctgagagagtacttgatgtaatttcgattttcttaaatttactgagacttgttttgtggcctatcatatggtctaccttgaagaatgttccatatgctgattaataaaatgtatattctgtagttgttgggtagaatgttctgtaaatatctgttatctccatttgttgtagggtatcctttaagtccattgtttctttattgactttctgtcttgattacctgttgagtgctgtcagtggagtttcccccactattattgtgttgctgtctatctcatttcttaggtctagtagaaattgttttataaatttgggatctcctgtgttagatgcatacatatttagaattgtgatattttcctgttggactagtctttttatcattatatagtgttcctctttgtctttttaaactgctgttgctttgtctgatgtgtgttttttctgatataagaatactcctgcttgcttttggtgtccatttgcatgggatatctttttccatccctttaccttaagtttatgtgagttgtcatgtgttaggtgagtctcctgaagacagcaagaacttggttggtgaattcttattgattctgccattctgtatcttttaaggggagcatttaggccatttacattcaatgttagtatcgagatgtgaggtactattctattcattgtgctgtttgttgtctaaataccttgattttttcattgtgtaattgttatacaggtgagatttatgctttaaggagatgctgttttggtgtatttttaggatttgtttcaagatttagaggtccttttagtagttcttgtagtgctgacttggtagtggcaaattttctcagcatttgtttgtctggcaaagactgtatctttctttaatttatgaagcttagtttcattggatacaacattcttggctgataatcatcttgtttaaggaggctaaaaatagaaccccaatcccttctagtttgtagggtttctgctgagaaatctgctgtaaatctgataggttttctttttgttttttaattatactttaagttctggtatacatgtgcagaatgtgcaggtttgttacataggtatacatgtgccatgggggtttctgcacccatcaacccatcatctacatcaggtatttctcctaatgctatacctccccttgcttcccaccccccaacaggccctggtgtgtgatgttcccctccctgtctccatgtgttctcattgttcatctcccacttatgagtgagaacatgcggtgtttggttttctgttcctgtgttagtttcctgagactgatggtttccagcttcatccatgtccttgcaaaggacatgaactcattttttttatggctgcgtagtattccacgctgtatatatgccacattttttttaactggtctatcattgatgtgcatttacgttggttccaagtctttgctattgtgaatagtgctgcagtaaacatatgtgtgcatgtgtcttcacagtagaatgatttataatcctttgggtgggattgctgggtcaaatggtatttctggttctagatccttgaggaatcaccacactgtcttccacaatggttaaactaatttacactcccaccaacagtgtaaaagcattcttatttctccacatcctctccagcatctgttgtttcctgaatttttaatgattgccattctaacctgtgtgagatggtatctcatggtgattttgatttgcatttctctaatgaccagtgatgatgaactttgtttcatatgtttgttggccacataaatgtcttcttttgagaagtgtctgttcatatcctttgcccactttttgatagggttgtttgtttttttcttgtcaatttgtttaagttctttgtagattccggatattagccctttgtcagatggatagattgtaaaatttttctcccattctgtaggttgcctgttcactctgacgatagtttcttttgctgtgccaaagctctttagtttaattagatcccatttgtcatttttggcttttgttcctattgcttttggtgttttagtcatgaagtctttgcccatgcctatatcctgaatggtactgcctaggttttcttctagggtttttatggttttaggtcttatgtttacatctttaatccaccttgagttattttttgtataaggtaaaagaaggggtccagtttcagttttctgcatatggctagccagtttcccgcatatggctagccagtttccccaacaccatttattaaatagggaatcctttcctcattgcttgtttttgtcaggtttgtcaaaggtcagatggttgtagacatgtggtgttatttctgaggcctctggtctgttccattggtctatatatctgttttgttaccagtaccatggtgctttgattactgtggtcttgtagtataatttgaagtcaggtagtgtgatgcctccagctttgttctttttgcttaggattgtcttgggtatacgggctcttgtttggttccatataaaatttaaagtcgtttttttctaattctgcaaggaaagtcaatggtagcttgagaggaatagcactgaatctataaattactttgggtattatggctattttcatgatactgattctttcaatttccattagcatagaatgttttttcatttgtttgtgtcttcttttatttttttgagcagtgggttgtagttctccttgaagacgcccttcacatcccttgtaagttgtattcctaggtattttactctctttgttgcagttgcgaatgggagttcactcatgatttggctctctgtttgtctactattggtgtataggaatgcttgtgatttttgcacattgattttgtatcctgagactttttgaagttgcctatcaacttaaggagtttttgggatgagatgatagggttttctgaatatacaatcatgtcatctgcaaacagatacaatttgacttcctctcttcctatttgaataccctttattgctttctcttgcctgattgccctggccagaacttccaatactatgttaaataggagtggttagagagggcatcctggtcttgtgccagttttcaaagggaatgtttccagcttttgcccattcagtatgatattggctatgcgtttgttataaatagttcttattattttgatatatgttccatcaatacctaatttattgagtgcttttagcatgaagcagtgttgaattttatcgaaggccttttctgcatctattgagacaatcatgtggtttttgtcattggttctgtttatgtgacggattacatttattgatttgcgtatgttgaaccagccttgcatcccagggatgaggccaacttgatcgtggtggataagctttttgatatgctgctggattcagtttgccagtattttattggggattttcacattgatgttcggcaaggatattagccagaaattttctttttttgttgtgtctgtgcccagttttagtgtcaggatgatgctggcctcataaaatgagtaagagagaagcccttcttattctattatttggaatagtttcagaaggaatggtaccagctcctgtttgtacttctggtagaattcaggtgtgaatccgtcttgtcctgggccttttttggttggtaggctattaattactgcctcagtttcagaactcattattggtctattcagggattcgacgtcttcctggtttagtcttgggagggtgtatgtgtccaggaatttatgcacttcttctagattttctagtttatttgcatagaagtgtttatagtattctctgatggtagtttgtatctctgtgggatctgtggtggtattccctttatcattttttattgtgtctatttgattcttctctcttttcttctttattagtctggctagaggtctatgtattttgttaatcttttcagaaaaccagctcctggattcattaattttttgaaggatttttcgtgtctttatcttcttcagttctgctctgatcttaatcatttcttgtctactgctagcttttgaatttgtttgctcttgcttctctagttcttttaatcgtgatgttagcgtgtcaattttaaatctttcccactttttcctgttggcatttagtgctataaatttccctctaaacactgctttagctgtgtcccagagattctggtatgttatgtctttgttcttattggtttcaaagaacttatttatttctgacttaatttcgttatttacccagtagtcattcaggagcaggttgttcagtttccatgtagttgtgaggctttgagtgagtttcttaatcctgagttctaatttgattgcactgtggcctgagagactgttcgttatgatttctgttcttttgcatttgctgaggagtgttttacttccaagtatgtggtcaattttagaataagtgctatgtggtgttgagaagcatgtatattctattgatttggggtggaaagttctgtagacatctattatgtctgcttggtccagagctaagttcaagttctgaatatccttgttaattttctgtctcattgatctgtctaatattgacagtggggttttaaagtttcccattataattgtgtgggagccttagtctctttgtaggtctctaagaacttgctttatgaacctgggtgctactatattgggtgcatatatatttaggatagttaggtcttcttgttgcattgattcctttaccattatgtaatgcccttctttgtcccttttgatctttgttcatttaaagtctgttttatcagagactaaaattacaacccccgcttttctttgctttccattttcttgttgaatattcctccatccctttattttgagcctatgtgtgtctttgcaagtgaggtgggtctcctgaatacagcacactgatgggtcttcactctttatccaatttgccagtctgtgtcttttaattggggcatttagcccacttatgtttaaggttaatattgttacatgtgaatttgatcctgttatgatgctagctggttattttgcccattagttgatgcagtttcttcatagtgtcaatggtcttcacattttagtatttttgcagtggctggtatcagtttttcctttccatatttagtgcttccttcaggagctcttgtaaggcaggcctggtggtgacaaaatccctcagcatttgcttgtctgtaaaggattttatttccacttcacttatgaagcttagtttggctggatatgaaattctggggttgaaaattcttttctttaagaagtttgaatattggcccccactgtcttctggcttgtagggtttctgcagagagatccactgttattttgatgagcttttctttgtgggtaacccgccctttctctctggctgcccttaatgtattttccttcatttcaaccttggtgaatgtgatgattatgtgtcttgcagttgctcttctcaaggagtatctttgtggtgttctctgtatttcctgaatttgaatgttggcctgtcttgctaggttggggaagttctcctggataatattctgaagtatgttttccaacatggttccattcttggttccattcaggtacaccaatcaaacataggtttggtcttttcacatagtcccatatttcttggaggctttgtttgttccttttcattcttttttctctaatcttgtcttcacactttatttcattaagttgatcttcaatctctgatatcctttcttttgcttgacagatttggctgttgatacttgtgtatgcttcacaaagttctcgtgctgtgttttccagctccatcaggtcatttatgttcttctctaaactggttattctagttagcagttcctgaaatgttttatcaaggttcttagtttctttgcattgggttagaacatgctccttacttggaggagtttgttatacccaccttctgaagcctacttctgtcaatttgtcaaacttgttctctgtccagttttgttcccttcctggcaaggaattatgattttttggaggagaagaggcattctggtttttggaattttcagcctttttgcactggtttttcctcatctctgtggatttatctacctttggtctttgatgttggtgacctttggatggggtttttgcatgggtgtcttttttgttgatgttgatgctatttcattctgttagttttccttctaacagtcaggcccctctgctgcaggtctgctggagcttgctggaggtccactacagaccctgtttgcctgggtttcaccagtggaggatgaagaacaacaaagattgctgcctattccttcctctggaagctttgtcccagaggggcccctgccaggtgacagctggagctctcctgtatgaggtatctgtcaaaccctgctgggaggtatctcccagtcaggaggcatgggggccagggccccacttgagtaggcagtctctctcttagcagagcttaagcgtcctgctgggagatttgctgctctcttcagagctggcaggcaggaacatttaagtctgctgaagctgcccctacagctgttccttcccccatgttttctgtcccagagagatgggggttttatgtataagcccctgactggggctgctgcctttctttcagagatgccctgcccagagagaaagaatctagggaagcagtctggcttcagcggcttcgccgcactgtggtgggttccacacccagtttgaacttcccagcgtcttagtttacactatgaggggaaaaccgcctactcaagcctcagtaatggcagacacccctcccgccaccaagcttgagcatcccaggtccacctcagactgctgtgctggcagcgggaatttcaagccagaggatcttagcttgttgggcttcacgggggtggtggatctgctgagcaagacgacttggctccctggcttcagagccccctttccaggggagtgaatggttctgtctctttggcattccaagtgccactggggtacgaaaaaaaaactcctgcagctagcttgatgtctgcccaaatgactgcccagttttgtgcttgaaacccagggccctggtggtgtaggcaccggagggaatctcctggtctatgggttgggaagactgtgagaaaagcatagtatctgggccagatagcaccatccctcacagcacagtccctcatggtttcccttggctggggagagagttccccaaccccttgcgctttccaggtgaggtgatgccccaccctgcttcagcttaccctccatgggctgcacccactgcctaaccagtcccagtgagttgaaccaggtaccttagttggaagtgcagaaatcacatgccttcttccttggtctcactgggagctgcagatgggagcggtttctatttggccatcttgccctcttcctgataggttttcttttatgggtaacctgatgcttttgtctcacagctttaatattctttccttcaccttgactttagatatcctgatgattatgtgttaaatgatgatctttttgtgatgaatttcccaggtgctctttgaatttcttgtatttggatgtctaggtctctagcaaggccagggaagttttcctcaattattccctcaaatatgttttccaaagttttagatttctccttttccttgggaacaccaattattcttaggttttgacacttagtccaaatttcttgcaggcttcatttatttaaaaaaatgttttttctttgtctttgatggattgggttaatttgaaagccttgtctttgagctctgaggtgttttcttctgcttttttgattctattgctgaggctttccagtgcactttgcatttatctaagtgtgtccttgatttccagaagttgtgaattgttttttatttatgctctctatttcactgaagaattttcctttcatatcctgtatatgtttttgatttctttaagttggacttcacctttcttcagtgactccagaattagcttaataattgacctcctgaattctttttctggcaatttggaaattttgtcttggtttggatccattgctggtgagcttatatgatcttttggaggttttaaagaaccttgttttgtcatatttctggttccttctcatttgggtagactatgtcagagagaagatctggaactcaagggctgctgttcagattttttttatctcatggggtgctctcttcatgtgatgttctcctccccaccctaggaatggggcttcctgagagccaaactgtagtgattagttttgctcttctgggtctcaccacccagtggagctaccaggctccaggttggtactggggagtttctacaaagagtcctgtgacatgatccgtcttcagatcttgtgaccctggataccagcacctgctccagtggaggtagcagaggagtgatgtggactctgtgagggtctttggttgtatttttgtttactgtgctagttttgtattagttggcctccagccagaaggtgatactttcaagagcacatcagctgcagtcttatagggaggatgcaaacttgccctagggacacctggttaagtatccaggattctcatgtggcgggcagggtagggccatagagctcccaagaggttatgacatttttcttcagctaccggggtgggtagagaaagaccaccaggtgggtcagggataggcatgtctgagctcagcctctccttgggcgtggcttgctgtggctgctgtgggtgatgggggtgtggttcctagtccagtggagttatattcccagggggattatggctgcctctgctgagtcatacaggttgccagggaagtagaagaaagctggcggtcaccagcctcaccttactctcatgcagctggcagtccttaaggctggtctcactcccactgtgccctgccaacagcactgagtctatttccaggcagccagtggccagggctgagaacttgtccctgactatgagcctccctcttgggaaagcaagccgactcacagttttttggcaactcagggagcctgcagcagtgatccagtttcttcaaaagttctgtggattctctcggctttcctggtatgttcctctggtagttcttattagcaaaagttcacaatatgagtctccacatgctgctctatttgtctgagtgggagctgcaggctagtcctgcctcctatccaccaacttcccaggatgccctctctatatctatttttaaattgactgaagctgagcagcatatatattcaacttggccatcatgatttgtgcaggaatgggcaagtgactgtaagttgggcccagtgcagcacaaggatatttcttctggctcctgggaaaacagctccctagagggatgttctccttctgttgtatgtgaactagaaaactcacagcattgagaggcctctggcagccagtgtggaaccagggaggaaagtggtcttagacacaggctgagcagagagctggttggctgcgtcaggctttgcttggacttgctgtgggacttatatttcacattataagccagtttacatttagttttctgttactgaaaacaactggaagattgctaactggtaaaaacattgaccttaaactaactccaccacatttaatggagaaacagagacattttcattaaggtcagaaataagaaaaaattgctgtggttctttctacaactgagtattgttttatatgttccagtcgttccagccttagctagaactcacccttagctagaacatataaaagcataatttttggaaaggaaggctttggaaaggatgatattatcattatttacaaattatacaattttctgtttgacaaataatcagctgaaactataagagagttcaggaatatggctagaaataaaatataggaaaaaatctataatttttctatataacagtaataatcagttacaaaatatgctggaaaatgagttcattcataattgaaagaaatagtatataggatcaggtttgaaaataacagcatttgacagagggcaaacatttcagaaatacatttaaataatccacaatttaagcgggagtgcaggccccctcagaaccctaatatcaatcataacaaaagttgcataattatttttggaactctgtaaggcaatgaataccaaatgctataacagcctaaaatctcttcatttccttgcctttatctgtcaagaaatttatcccatgaaaattactaaagatctcttcaaagacttagttccaaggatatgcactggagtattttttataaatccaggaaataattgaaatgtagcacaaaatggataaggttaataaattctgttctattcatacacaagggaatagtttgcaattattgaaaagatgcttcttacaaggatatttgttggtttggaaggacttatataatatgataaatgaaaatgcaattttatcagtagtaggtacagagtgacctcattttaaagcagatgtgatgtgacagtgggcagatttgggagaaagactggactaggtgtcccaggggatgtcacctggcatagaggccacgtgtctgcaacgtgggtcttcagaaggtagcagttctgagaggaagcacatagagacagagccagggaaaaggaatgctacacttatgtgcataattctcccctatggctccacatgtctttagtggaacacacctttcttgtggaaggtgcatgggactgagttttgcactatcactgtggacagaggagtgcgttagttatttattgctgtgtaacaaattatccccaaagttagtaggttttatctcacattatttattatctcacacagtttctgagggttaggagtctgggattgatttagcttgatggtgctggttcaggatctcacacgtcaggcttgactggggtgggagggtctgcttccaagggactttcattccttaccacatgggtctctccattgggctgctcacagcatgacgcccaccactgcaaggaatcagagagagagagagagagagagagagagagagagagggattgagtacacaagacaaaagccacagtctttacaagctactttcagaagtgacataccgttcttctgccatatgctactgtcacagagatttaccctaacacaatatgggcgggcactgcacaagggtgtgaatgctgggacaccattcttggcaactgtgggaagagaaaagagagtggagttagggtggagagtgagccctgatgacacaggggcagacggtggggtgatcacaggtaatatgttgaattcatcaagtggtaaaataagtgtttggagctgagttcatctccatctccaaggggtcttataggcttaaattgccatatggagtatacacaggattggactgaaaccttttgctgtctattacggaaaaatttggggatcaaaaagaacctgcttgagaatggtgcccttcaacacatatagcctgagcagagggactggcagttcacatgaaggatctttacactggaatgcaggcctggaaggaagacgactgcagcttttgtataaaaaagtctgcagttattattattaatttacaagtggaaggggccaagttgtgctataggaggaacatgtattcctcgtgtagctgtaaatgcacaagccctgctagcaagttctcaaaccagcaaacaattttggttttggcaactgagttgcgctcatttcagctagggaaacactgaaccaaattcaaggacaagggtttcctcccaccttttcatcccaccccagtgagcccacccacagaatcagagctaccccgctttcccgtgagagaagcagaagactccttggacatccagctgaagtttgaagcagcagtgtctgtaggtacaagaggagaggggatgagactctactgccctctggagaggggtccttggtaaaagatggggcccaacagcagatggaggaggtcttgagggaggtctacaagaaaagcaaaaggaaggttggaggatagagttaggaagttagggtgtgtccttgagggactccttccagaggcccctgtgcgacacaggattccaggtagctaagtaaaggtgtgtctcctcatctgcctacctgcaaaaaggaaacatgtagatttccatcaaaattctatgcctggtttgtggcagacagaagaggttgtgccagggagaagacagcctgaatgctgataatctgataagcagtaaccatcctccgtgggtgcctgggtgaaggccaaccaaccatggacaactcacagtccaagatgcacagagctgcttcctctgacctgtgcttgaatcctccacacccaccacctcctgcaaagcacaaagggatagtaaagaatcctaaggctctgttcccatacatacacatacaccaggtgcacacacatacacactcatgtgcacacatatatgcagagacatatatgcagagacaacataggagtcatttaattttatatagctcacgtaaaatccagccccttcaatggctcagtctcagtactgtgtcacattcaaagaaacacagtctagccaacaaaggtgactaaatagcacatgctgttatactctttgcaaatatctcccaaagaacattaaaggggaactaattcttagcccagagcaatttttaaaaatctcctctgctccccttttactgtttcatgccctgcaattgctttccaaactcctgattctctgtcatgccagtcttctgctcttgtcttttctttctctctttctttcctcccaacccttaaggaatgtttctctataattcatcttccaaatctccagggatcaaggaagggagaggtcacacctgcttgtggacaatgaggaaattgtccctggaaaggctggcattggagatgccccctgatgaatcagcgatagagaaaagagggaggatacaaggagagagaagagatggggagctgcaagttacctcagaaccccagactcatgggctcctgagctggaagggccattagggccaggcatggccatggtgcagttgaacagagctgcaaagatgcatgatgcggtcaacaccctctagtagctcatgtaatgggacattgacggcagtggggtgaggacagtctagaggtttgcactgggagatttcgggagacacaaaaagggccagtgggagttaacgaaggcttcctgggagagggtgaggccagaggtgagctggatgtatgacattactgagggaaccaggggctgacagtctcttccaggcagagggaaaggtctgaggaaaggtaggaaaaagggagtgatcaaggaaagtattatttgagcataaaatataaagaaaggagtgatgggagataggccagagaaacaagcttgcatggaaagtcttgttggtcatgctagggagttcagaatgtggcctgtgggggaatctcaggggagttttagcagaaaggggtacgggtagacttgccctatccacacagttacccagggacacgtgggaatgcactgggcaagggggagaaggagagaagtataggacagaaactagaggaaatttgggaggcaaagagttagggtttggacatagcaggtgagagggcaggaagggccaagggtgattctcaggtttgtagccgggagacgagcagacagtggggtctgcagtgcaggtgggaaagcaggattaggctgagggttgtgggaaatgtggttttggctttcggcacattgactgaggggctggacagcatccacgtcctagtccacagggcaggagtgtgtagaatggggagggggtggggacaggaccctgggacacccacagtcttgtggtaaatggtgggagacgcgcccacggtggggcctaggcgaggggcagcgggtggaggcctgggccagggaaggagagggaacaaggggctggagaagtgtgtggaggagcttcagtgccaaaccacaggggagcgacggggtcagagcctggactgtcggtctggccatggtgggaggatggctggaaggaaatggtgtgggggtggctgttgtggtctgaacacagggactagagaagggccccaagtggacaacgcttcagctaggggcccacaattctagaaccacagtgtctgggttcagttcctagctctgccgcttgatagctgtgtgaccttgggcaaatcacttaacttttctgtgcctcagtttcctcatctgtgaaaggagtatgtacctcaagggttgtaatgaggaaaaaacaaattggtaaatgtcagttatgacttgatacaaggtaagtactctgtcaaaagtgctattattatgttacatatgatattttattgtagagtatatgtatagtatctaaatatatgttacatatatagtacatatactctagtgtgtatacttattagtcagtttgggctgctataacaaaatatgatagactgggaggcttaaacaacagacatttatttctcacagttctggaggctgggccgtccaagatcaaggtgtgggcagatcaggtgtctggtgagggcttgatacctagtttgctctcagctaccttctccttgtatccttgcttggcagagagagagagagagatctttcttttgtctcttcctcttatcccatcatgagggctccaccttcatgacataattacctccaaatgtccgacctcctaatacaatcacattgggggttaggattccaatattatgaattttggaggagacataaacattcagtctataacaacatacaataagtgctatctatttctattatatatgttacatatgctattattatagtaaatactactaatatatattagtatattagcagatgtttgtaatatttataatgtatttaaataatatgtgacacatgatttaaaataatatatgatatataatacagtatatattatgtatatttagtaatattcattattattattatttttttttaatgtttttttttttattatactctaagttttagggtacatgtgcacattgtgcaggttagttacatatgtatacatgtgccatgctggtgcgctgcacccactaacgtgtcatctagcattaggtatatctcccaatgctatccctcccccctcccccgaccccaccacagtccccagagtgtgatattccccttcctgtgtccatgtgatctcattgttcaattcccacctatgagtgagaatatgcagtgtttggttttttgttcttgcgatagtttactgagaatgatggtttccaatttcatccatgtccctacaaaggacatgaactcatcattttttatggctgcatagtattccatggtgtatatgtgccacattttcttaatccagtctatcattgttggacatttgggttggttccaagtctttgctattgtgaatagtgccgcaataaacatgcgtgtgcatgtgtctttatagcagcatgatttatagtcctttgggtatatacccagtaatgggatggctgggtcaaatggtatttctagttctagatccctgaggaatcgccacactgacttccacaatggttgaactagtttccagtcccaccaacagtgtaaaagtgttcctatttctccacatcctctccagcacctgttgtttcctgactttttaatgattgccattctaactggtgtgagatgatatctcatagtggttttgatttgcatttctctgatggccagtgatgatgagcatttcttcatgtgttttttggctgcataaatgtcttcttttgagaagtgtctgttcatgtccttcgcccactttttgatggggttgtttgtttttttcttgtaaatttgtttgagttcattgtagattctggatattagccctttgtcagatgagtaggttgcgaaaattttctcccatgttgtaggttgcctgttcactctgatggtagtttcttttgctgtgcagaagctctttagtttaattagatcccatttgtcaattttggcttttgttgccattgcttttggtgttttggacatgaagtccttgcccatgcctatgtcctgaatggtaatgcctaggttttcttctagggtttttatggttttaggtctaacgtttaaatctttaatccatcttgaattgatttttgtataaggtgtaaggaagggatccagtttcagctttctacatatggctagccagttttcccagcaccatttattaaatagggaatcctttccccattgcttgtttttctcaggtttgtcaaagatcagatagttgtagatatgcggcattatttctgagggctctgttctgttccattgatctatatctctgttttggtaccagtgccatgctgttttggttactgtagccttgtagtatagtttgaagtcaggtagtgtgatgcctccagctttgttcttttggcttaggattgacttggcgatgcgggctcttttttggttccatatgaactttaaagtagttttttccaattctgtgaagaaagtcattggtagcttgatggggatggcattgaatctgtaaattaccttgggcagtatggccattttcacgatattgattcttcctacccatgagcatggaatgttcttccatttgtttgtatcctcttttatttccttgagcagtggtttgtagttctccttgaagaggtccttcacatcccttgtaagttggattcctaggtattttattctctttgaagcaattgtgaatgggagttcactcatgatttggctctctgtttgtctgttgttggtgtataagaatgcttgtgatttttgtacattgattttgtatcctgagactttgctgaagttgcttatcagcttaaggagattttgggctgagacgatggggttttctagataaacagtcatgtcatctgcaaacagggacaatttgacttcctcttttcctaattgaataccctttatttccttctcctgcctgattgccctggccagaacttccaacactatgttgaataggagtggtgagagagggcatccctgtcttgtgccagttttcaaagggaatgcttccagtttttgcccattcagtatgatattggctgtgggtttgtcatagatagctcttattattttgaaatacgtcccatcaatacctaatttattgagagtttttagcatgaagggttgttgaattttgtcaaaggctttttctgcatctattgagataatcatgtggtttttgtctttggctctgtttatatgctggattacatttattgatttgcatatattgaaccagccttgcatcccagggatgaagcccacttgatcatggtggataagctttttgatgtgctgctggattcggtttgccagtattttattgaggatttttgcatcaatgttcatcaaggatattggtctaaaattctcttttttggttgtgtctctgcccggctttggtatcagaatgatgctggcctcataaaatgagttagggaggattccctctttttctattgattggaatagtttcagaaggaatggtaccagttcctccttgtacctctggtagatttcggctgtgaatccatctggtcctggactctttttggttggtaaactattgattattgccacaatttcagagcctgttattggtctattcagagattcaacttcttcctggtttagtcttgggagagtgtatgtgtcgaggaatgtatccatttcttctagattttctagtttatttgcgtagaggtgtttgtagtattctctgatggtagtttgtatttctgtgggatcggtggtgatatcccctttatcattttttattgtgtctatttgattcttctctctttttttctttattagtcttgctagcggtctatcaattttgttgatcctttcaaaaaaccagctcctggattcattgattttttgaagggttttttgtgtctctatttccttcagttctgctctgattttagttatttcttgccttctgctagcttttgaatgtgtttgctcttgcttttctagttcttttaattgtgatgttagggtgtcaattttggatctttcctgctttctcttgtaggcatttagtgctataaatttccctctacacactgctttgaatgcgtcccagagattctggtatgtggtgtctttgttctcgttggtttcaaagaacatctttatttctgccttcatttcattatgtacccagtagtcattcaggagcaggttgttcagtttccatgtagttgagcagctctgagtgagattcttaatcctgagttctagtttgattgcactgtggtctgagagatagtttgttataatttctgttcttttacatttgctgaggagagctttacttccaactatgtggtcaattttggaataggtgtggtgtggtgctgaaaaaaaatgtatattctgttgatttggggtggagagttctgtagatgtctattaggtctgcttggtgcagagctgagttcaattcctgggtatccttgttgactttctgtctcgttgatctgtctaatgttgacagtggggtgttaaagtctcccattattaatgtgtgggagtctaagtctctttgtaggtcactcaggacttgctttatgaatctgggtgctcctgtattgggtgcataaatatttagtatagttagctcctcttgttgaattgatccctttaccattatgtaatggccttctttgtctcttttgatctttgttggtttaaagtctgttttatcagagactaggattgcaacccctgcctttttttgttttccatttgcttggtagatcttcctccatccttttattttgagcctatgtgtgtctctgcacgtgagatgggtttcctgaatacagcacactgatgggtcttgactctttatccaacttgccagtctgtgtcttttaattgcagaatttagtccatttatatttaaagttaatattgttatgtgtgaatttgatcctgtcattatgatgttagctggtgattttgctcattagttgatgcagtttcttcctagtctcgatggtctttacattttggcatgattttgcagtggctggtaccggttgttcctttccatgtttagcgcttccttcaggagctcttttagggcaggcctggtggtgacaaaatctctcagcatttgcttgtctataaagtattttatttctccttcacttatgaagcttagtttggctggatatgaaattctgggttgaaaattcttttctttaagaatgttgaatattggcccccactctcttctggcttgtagggtttatgccgagagatccgctgttagtctgatgggctttcctttcagggtaacccgacctttctctctgaatatgtgacacatgatttaaaataatatatgatatataatacagtatatattatgtatatttagtaatattcattattatatataaaatactatgtgattgcatgtactgctagtgtagattctgtatatatgattactgtaaaagcaattattatcattgtctttgttattagaatccatttgatgccactgttactgaggtcaatagagagatagtgagaataacatagaaattgtgaatcctgttgatactaggattagaaatagatctgattgcatgtgtgtttgtgtgtctatgtgctcacgcacatgtgcacgtcggtaggtaatgaatctggctttgagcacaaaatcacagaaagaactgataggaatactgcagacgatgtggtcccattgctcattttgttgatgaggaaagtgatgtcagtgcttcatcaagcaacctaaggtcccactattgctggcaggtctcttgtctcctcccttcttgaatttgggtggaatccagtgaagatggttagcaaagagatgagggagtggtcctgggaggaggctcctctactggaagattcggctattcttccttaacttgagcctagtgccacgcttctctcctgcccttccctgcttctctatactttcacttcccaccttgacatttaaaacctctgttttctgagtaacactgatgctaatgtttgtctttttggggcctccttctgatgctaggctcagaggacattcaaaataataacagatcagtgcttccgaaacccaatttaatacaagaaggggtgggtgcctgttttgtcttgaagtccagagccaggtgagtcactgtgctccccatggtcaatttcctgagagattatcatcttgaggaggacatatcaagtaccttccaaggaggcatccaagattcagggctgtttttccagcccatggagtcccaggaattgtttcttctctattgattgattcttctctattgaagacccttattgaggacgaaaattttttctctgtggattttccacgtaatcttggcttgagagaaaatatagtaattttaggcagtttgtgattctagaggtgttaagaaagacatttccaaatacatttagggatgttgctggataaatctaacccctgccttcccccctgactccaccgcaggatcacggggaggcaaggctgtgattgcagctgggtgtctttgcagcatctcagcctcgtctcccacacccagttcttctccagcatccggggcttccatgctgtcgactggtgtgacctgaggaccagtgtgaccactccccctctcctccctgagcaagcccctgccatgctctgtccatcctctgcccctgactggcatcgacccctggtacctcagcctcagtgccaggactttgagccaggagcagcaaattggggagccaatgtgaggatggggagaatgaggcctgccatggtctgggtctaggctgcttttgtccagcgactccccagggtgaccacccctgaagtggacatcatttctgatctaagtggaagagtaagacataaaggacaactgaagtgagggtgcaggaggctgccccactcagaccgtggtgtttgtatcagaagctcttctctgtaaggggaaggtgggagcaccaggatcttgactgtattttccagctgagtcttcctgatttggacacgttttaaaactttcgaatttttagagtattggtttagagtgatggagccaacttcatggggtcaaacatatgtaatttacataaaagtactaaacagttcatttaaattacagttacacacaactcgatggaacactgagttttaaaaagtcctagaaaatgatataccctatgaaacacttttaatacaattaaaagcaactaaaatgaaacaacatatttttagaaaaacatgtgttaagactatatgcaaaataaaaaagaaaatgttaacccaggtgtggtggtatggcctatagtcccagctacttgggaggctgagacaggagaattactggagcccgggagtttgaggctagcctgggcaacacagcaagggcctgccttaaaagaaaaaaagaaggagaaagaaaagagaggaaaaaaagaaaatgttaaacctttggttaagttaattttggagaggtgggggacagtgtggaagagaagtgtatgtgtaggtataaattattcctagtattttgggttttgtgttcataatatattcattgatgtttattacattagattattaaaataatataaattagactaatataaattaaattgttcaggccaattacaaaagtgaattagtgatctagttagcatttattcatatgccaggtagtgttctaagcactttacatataccatcgactcactgaatcctcaaaacagtcctataaggtgggattattattatttctatttccatggggaaacggaggcacagagagatcaagcaactagcccaataccacacagctgagcgggaattctaacccaggctgtgtgtctccagagttctgctctcttaaccacaaatgttgtgaatgatgtattttgtgaacccagggttcctaaaaaaagaggaacaagttacctgaaggaactggtttctatagaaagcaggtagagtgtgcaggaaaggaggatgtgtggccttagtctgggaggaaagttggtggttttgtttagactaatgtgtcggttggttaccatctctaccctcccaggcaaaatacttgcactttagcaatgccttactgggttaattctaatagtggggattttgggtgacatggcagactgttgggagaccatccattgactgcgtgagtctttgagctcttttcgtatcatactggtgatctggctgctggctagatggagttagtgcccctttttgttttgcctcaagatttatcacctattaagcaaatattgacttcttaaattaaattgtaatgcctcttgcaacagaagtcaatagttgtttgatgacatctggtgactaagtgcagcgaggtggctagtctatccatcaacaagacctagcatggaggcctccttttcctgtaaggcagaggttctcagagagtagtttccagaacaataggactaacatcctttgggaaatgtttagaaatgcaaattcctgggccttgcctcctactgaacccaaagagatgggggtggtgtccaaccccaccagtggtgtgctggcaaatatttaacaagtgcctctttgaaaaagtgcagatatttatgtacgtaaattttgctgatacattgaatgtgtagcacacaatttacaaataataaaatattcaatattctttactataaatgttatgtagctaattggcttttgcagaatgctttcattcattgtttttttgtcaaactcttgtatcagagacaacctagggttgcaattgatgaatgagtgtagttccaacatgaatgttgatatttttgtttatattaaggagtaagatgaaagtgaaacaaaatgaagacatatgtcacaatgtcacttgtttgtcagtgatgtgaacaatttgtttgctgaatcgaatgttggaagactattttctcaactttttttctattcacaatataatagctacaggttaacatattttgaagcttaatctgtatttttacaattttctccatcactttcttaagtctagacaatcaacaaaataataaatcaagcccatttgctcatttctgtggtgtaaatatttctgtcctggccagtgtcaagccacaacatgatactactcaacaaggagttagaaagagatgtgtggccccacatcataatgtactatgtccattgttcagacacagtagatgtaaatatcctccacagataatggaaatatgtagtacaataattaggaagttgcttctaatgcaatttgtttttcacgtaatttctttatctacacatttttatcatttattttttaatgacagcttgtgtttcacaacaggcttgcagagttcctgaaaatttaacaatggccctcatgagctggtatgaattgggcccatcaatctgtgttttaacaagccttccacatgattctgatgatgcgaaattttgtgaaccactgcttcagcagatggtgagaacaaggaatgcatgtagctatacttaacctggtactacatgctctatgtctggccaaccaaatgctatactcaaatgtttaagcaagttcacattggggacagtggggaaagaaggaagtatatctaaaggagaacagaggaatgagaaaaggttttaattttagatctttgatttttttttcttctggatttggcctgctttggtaaactgtttatagatattcaaataaattaggactaaattatggctcagtttattctcttgaaacaaaatggcagccaatgcaactgctcaaatgacatatcttctgaagtctaaaaaacttcagttagttcattcaataaatacttactaactacctatgatgtgccaagcactacaccgggtgttggttgtgcagcatcaaataaggtagataaggacactgatctcaaggttttaggaggaagaaatagaaaaacccaagtaagtgccttaggtaagcaagataattctttgagaaggaaattatatgggtggagggtgttgggtgggaagagatttctttctggctgggggattagagagggcctcgttgaggaggtgtcaataaggtgggtggtgaatccagccatgtaactacctgggcaaagagtgtccaggcagaggggacaacaattgcaaagatattgagttgggaatagatttgatgtgtcgaaggcctgcctggtaagagggctgatgtggctggagtaatgtgaatgaggccagagtgagagaagatgtgttgaaaggcaggcaggcaggggccagatcaagttttaggctaagcaaacattttggatttcattctgagtgatgggaatcctttggaggcttaaagcagggagtgactggtctaatttctgctttaaaaagatcactcactgctgtatagagaataggctataacaagcaagactggaagcaggaaaatgcactgggaaaatgttcaaagagtcccagggaccagataacggcttggaatggaagtggccagatttgggaggtactgtggaggaatagcagattgtcctggttgagagagtgtggcaaattctaagtacaaaatagaccattaaccctaccatctttaagcaaagtagactagaatccttgatatttatgtctgctcatgtcttaccacactggttgatctacctgtttcagaattatgtatataggaagtacaagataagtggtgaccccttaattggatgggtggctgaggaggtaacactccagacagtctaagaagatgaagtataatcctctgactgcagccccatgagcttaggtagataagggccaagcatgagtaagaatagagattaccccactacctcctcattcctgtgtgtagatgtgagtagcaattacttgtgtgtgtctgtgggactctcagcctgcttgaattgggtgatgaaacctgtggcatgggtcaggaaacattcacgtttcccatgccatctccccaggcttggtgtgtgcatttgccaggagtgggcttggagaataaccttccaaggactctggcctgcaggtggcttagcctgtggataactgataatgtcttccgatgcatacagtacaggagctgccacaggaagactcacagcgatttccagcccgatgctgaggttgttactgtggtccatattttgtgaattattcaacatatgatttttattcagtgacttaaaagaaaatatgaacacactaacgtctcatttatccagtattctttgagaacacaacattccatgtaaatgcatttttcacgtatacctttaaatgtcaaggcaaattttatgtcatgaaacattttgagcacttgggagagaaggctttctatagcaagcaataccctgaagcagaggatctgtatggtttaaactttccttgaagcctcctgttcatcattatgattgtcaattaccactttatgctataatgcagtgacacagggactctgagctctgtgaatcagactattgtgcaaattcctcattccctcattttctctttggagaactaggcccccattagactgttttacaacattaacacttagtaatggcacccaggggcaaagtacaagcaagccggggtcacctaccacagcactgtttcttgttagaaaattggtgcttttaagaagatggttcttccacgagagaggttttgcctagttgttgtccagttagttatctggcctgcatttacgggaagcagaagtctcagcgtctccagaagctgtatctctctttttctgctcatctgagtcatgtgcactgaatgtgactcccccacacatctgtattacttatcaatacaaaaacttagtattgctcctcactcataaaaagcatccttaacatctgggaggccaaaagaatgaaacggagttagaatgagaagggcgagatgccttctgggttatccaagcagaagccaaaggaggaaatttgactgcagcagaccagggtccccccagtatgtaaaatagtgtcagtgagacctgggtcaccagtcctcaccatgggggccatgctgcaagtgatagtgaataggtggatgctgaaggggagctctggggcaaacaggcacagctgtactgtgttgaatgttctcctagagcccgtttgtgtgttaagatggacctggctcttggaaaggttatgtcacagaatcttctagaggtctcgctacctcgctgtgatgtataatggctcccttgctccagaatttgtgacaagaagcgtttgatgcagtcatttacattaaaaaataaatggtgtctttcttccagtccctggatcctggcaatcagagggctgtttctagtgtgctgtgatggacgtgcttatcttccgctgcagttcatcctgcaacagtaaaactgcaggcagcacacagacaagtttctgccgacaggccagataccagaagtgtaggtgggaaggttcagggctgccttttgaaccaaaacagaagagagatgaaccaagaaagtgtctgcagtttgcctgctgttttctccttcctttggggaaatacataattattttgtatctacttatacacatatgcaggtaatttttcttttttaaagagaaaggtcaaagattgtctgtgtcacatcacactgaaactgcttcggccccttcctctgtatttctgtggtaattggttctgtgagctacaaatacaacagacgtggactgaataggatgagaccacctgtgccaggtccaggcatgcttttcccaaatatggaaaaaaacagggctgtcttgggctggtggctttgacttgaagagaaatccatggtctaaagactctcttttgttccttgtttttcacttagacccaagggacaaggactccacctgtccggcagcagaggctgttgcctaagcctgtgtcatgtaaactgtccatgaacctttactgccattactgacatagtctttggtgcatctcgttgtaagtaagaccctgttattgggctgggcttgagatgcgtaacatccatggcactatccttcaaggggcttacagtttggttagataaacaagagtgatgcctgaaaacaacaacaacaaaaacaaagacaaaaccaaaaccagacaacaacaacaacaacaaagacaaaaccaaaaccagacaacaacaacaacaacaaagacaaaaccaaaaccagacaacaacaacaacaacaaagacaaaaccaaaaccagacagcataaccacctaccccccaaccaaccaaccaaaataaaaaaccaagaaaacagaaacaacaacaactacaacaaaaaaccagccaccatccccccattccttccctcctccctcctgcaatgtaagcagctaactttgttgctgatttctcttacccggaaggtttttgggggcagaggggtaacgacttgtggatttcttgagctggagattattagagcttcatgccctgttaacgtgtccaaaagagctctctgttgtctaggttcagggacacagtctgcaaatcacagctatccaggaaacactttacaaagagttttctgaacactgcatttcatttgtggagaggaaaaatgcctgcatttaacttctgcctcccaatctgcagttgacagaaatgaggaaactgctcaatttcaggtgtttacctcaaaataccccatcttagccaagtgcatggccgctcccttctgcgaatgcaagcctccactgtcatgccttgtgttttttcctctctcctggtgttggcttaatgctcacgtccaaaaagcaggctttcagcaaattgcattctgattgactgacctggttttctgctggggagcagaacactaaagccaaatgaatttgaccaaaacttgctttgctgaataccttcagtttcttcggagcagcctcagacatgttttataagagggaatgaagactattatttaagaagaatggtacaagctagaatcacagaaaagagggttttagagttggatgaaatctcaggttatttgtcctaagctattagctattcacctcctggtcttctttggagagcgcctattgagaccagctttcttttctttttttttttctttttgagacagagtctctctctgtcactcaggctggagtgcagtggtgtgatctcggctcactgcaacctccgcctcctgggttcaagcgattctcctgcctcagcctccgaagtagctgggattataggtgcgtgccaccacgcctggccaagaccaagtttctaaatttgtaaaaccatgtacctttgaacaattagatcttgtcttttgactttctgttcaccttgccatttgtttttagctcgaatctcatacccgtttaatccatctaacttaggaccctggtatccaaagtgaggtatggccccatggacttcataacaacacttgatagtgctggggtaatgtgtgtgtgtgtgtgtgtgtgtgtgtgtgtgtgttttgagttggagtctcacactgttgcccgggctggaatgcagtggtgcaatctcggctcactgcaacctctgcctcccaggttcaaacgattctcctgcctcagcctccagagtagctgggattacaggcacctgctaccacgggtaatgtggttttttaatggggtaaattggtaaaacccagggatttagaatctcctgattgttctcacggacccttgtctaagccatccacatcttggactccagccatttcctctttcaacccaatagcactgtcttcccaaaccctaggactgtcacagtcttccccaagctaaacactttaatatctccctattagtttttttttgaaatgaactttttattttataatggttttaaatttacagggaaagtgcaaaggtagaagagggtttccatatactccaaacccagttttccctttattaatatttaatatagtataagacatttgttataataatggaccaatacttatacattgttattaactgaagtctatgcattattcagattttcttagttttaacctaaagtccttgttctgttccaggatcccaccaggatactacattgaatttagcagtcatatcagcttctctcagctgagatagttacccagacttttcttgttttcgacaaccttggcagttttgaggagtattagtcagtattttgtagaatgctcctctaatgagatttgtccgattttttacccctcatgattagactgcagtgatgtgttttttggaggaagaccacagaggtcaagtgacattttcctcaccctcaaatcaaaggtccacactatcaaaattacctatcactgctgatgtcaaccttcaacacctggctgaagtagtctttgttggctctctccactgtgaagttactcctttttcctcttagaaagtaacttatcatcagcagcacccactaaaggactggcaagttttgctctgtctccttgagggtggagtatctacacaaattatttggaattcttctgcacggagatttgtttcttctatccttattttgagttattcaaacatttatttgggttattatggacttagagatatttatttgattttatactttgtattttcttttttttttttttttttttgagacagagttttgatctgtctccctggttggggtgcagtggtgtgaacatagcccactgcagccttgacctcctgggctcaggaaattctcccacctcagcctcccaagtaactggaaatacaggcacacaccaacacatccagctaagtgtttgatttttttatagagatagcgtctccctatgttgcccaggctggccttgaattcctggactcaagtgatcttcccaccttggcatcccaaagtgctgggattacaggcatgagccactggtggtgcctggcctattttatgcttttagttataattcaatactagtttattttgttgttcaaattgttccagctttggtcatttggagctctttcagttggctcttgtgtcttttcaacataagctactgttgtggaggtttcttgagcacttcttatttctggtggtacaagatactccaggttaggttccttttgtatctttcttgccccagtcttttttccaaggttccttggtttcccttttatttctaaagctacttaggtatacactgtttcctcaaacttcttcattcaggttattgcatacatttttaatgcagttagattgttttatcacattttgcattccatcctgggatctcctaacatcctaaatgattttttttttttacattgcatacattaagggtcattcattgtgccatcaagttctatgggttttggcaagtgtgcagtgccatgtattcaccattacaatattttcattggctgaatgaaccctccaaaaatgtgcatgtcctaaggaatatattactatgaacctgtgaatatattactttacatgggaaaagggaattttcaaatatgatggatttcacatttcagataagtgaaggattttgagttggagagattatccttgattatctgagcagacccaatgtaattacaagaaagagacagagttaggatgtagagatgtaatggaagcaagaggttggagtgatgtgaggaaggggctatcatccaaggaatgaagacagcctttagaaactaaaaggcaagaaaatggatttgctctaaagcctctggaaggattgcagctctgctgacatattgattttagactttattgtacaagaaatacaagagggtaaatgtatgttgctttaagccattaactatatggcaatttattgcagattttggtacttgaaaatggagtgctactctaacaaataataacttaaaaatatgaaagtggctttggaattagctaatgggtaaaggctggaagaactttgaggaccatgatagaaaaagcctagatttcttggacagactgttgatagaaatatggatgttaaagtttcaccctgtgtgggggttgtcaaacaccctatacaggagtgttcctactggcatcaggttggtgcccctcgaggtcagagatcccagaggatggagcaggcacccatctttgctattctccagccttcttgagtgacatctctaggcgtggagtgaaccaggtgaatagggcctgaagtgaaccctcagcaaaccacagcagccctacagaagaggtacctgaccattgaaagaaaaacaaataaacaaacaaacaaatggaaagcaacaacagcatcacaaaaaagtccccacaaaaacctcatccaagtgtcagtggcctcaatgatcaaaactagacaaactcatgaggatgagaaagaatcaacaaaaaggccctgaaaacccaaaaggccagagtgcctcttctcctccaaatgagtgcaacacctttccagcaagggcacagaactgaacagaggatgagatggatgaattgacagaagtaggcttcagaaggtgggtaatcacaaactctgctgagctaaaggagcgtgttctaacccaatgcaaaggagctaagagccttgataaaacgttacaagggatgctaattagaataaccagtttagagaggaacataaataacctcatggagctgaaaaacacagcacgagaactttgtgaagcatacacaagtatcaatagccaaatcaatcaagcagaagaaagaatatcagactttggagaccatcttgctgaaataaggcaggcagacaagattagagaaaaaacatgaaaaggaacaaacaaaacctctgagaaatatgggactatgtaaaaacactgaacctatgattgatcggagtacctgaaagagaaagggagaatggaaccaagttggaaaacacttcagggtattatccaggagaactttcccaacctagcaagacaagctaacagtcaaatttaggaaatacagagaacaccactaagatactcctcgagaagagcaaccccaagacataatcagcggattctccaaggttaaaatgaaggaaaaatgttaagggaagccagagagaaaggccaggtcatctacaaagggaagcccatcagactaacagtggatctctcagcagaaaccctataagccagaagacagtgggggccaatattcaacattctggaatttcatatccagccaaactgagcttcataagtgaaggagaaataaaatccttctcagacaagtgaatgctgacagatttcatcaccaccagacctgccttgcaagagctcctgaaggaagcactaaatatggaaaggataaaccagtaccagccactgcaaaaacacatcaaaatataaagaccaatgacactatgaagaaactgcatcaactagtatgcaaaataaccacgtagcatcatgatgataggatcaaatgaacacataacaatgttaaccttaaatgtaaatgggctaaatgccccaattaaaagacacagactggcaaattggataaagagtcaagacccattggtgtgctgtattcaggagacccatttcacatgcaaagacacacacataggctcaagataaagggatggaggaaaatttaccaagcaaatggaaagcaaagcaaaacaaaacaaaacaaagatacacaacaaaaacaaaaacagaaacaggggttgcaatcctagtctctgacaaaacagactttaagccaacaaagaccaaaaaaggcaaagaagggaattatataatggtaaagggatcaatgcaacaagaagagctaactatcctaaatatatatgcacccaatacaggagcacccagattcataaaacaagttcttagagacctacaaagagacttagactcctacacaataatagttggaaactttaacgccccaatgtcagtattagacagatcaatgagacagaaaattaacaaggatattcaggactagaactcaactctggatcaagtggacttaatagacatctacagaactctccaccccaaatcaacagaatatgtattcttagagccacatggcacttattctaaaatcaaccacataattggaagtaaaacactcctcagcaaatgcaaaagaacagaaatcataacaaacagtctcttaggccatagtgcaatcaaattagaactcaggattaaaaaactcactcaaaaccacacagctacatggaaggtgaacaacctgctcctgaatgactccttggtaaataatgaaattaaggcagaaatcaagaagttctttgaagccaatgagaacaaagaggcaatgtactagaatctctgggacacagctgaagtagtgttaagaagaaaatttatagcactaaatgcccacatcagaaagctaaaaaatctccaatcaacacctgaacatcacaattaaaagaactagagaaataagagcgaacaaatccaaaagctagaagaagacaagaaataactaagatcagagcagaactgaaggagatagagacatgaaaaaccctttaaaaatcaataaatccaggagctggttttttgaaaaaattaataaaatagaccattagctagactaataaagaagaaaagagagaggaatcaaatagacacaatagaaaatgataaaagggatatcaccactgatcccacagaaatacaaactaccatcagagaatactataaacacctgtatgcaaataaactagaaaatctagataaaacagataaattcctggacacatacaccctcctaagactaaagcaggaagaagtcgaatccctgaatagactaacatcaagttctgaaactgaggcagtaattaatagcctaccaaccaaaaaaagcccaggaccagacagattcacagctgaattctaccagaaggaactttgaaatagttccttctgaaaccattccaaacaattgaaaaggagggactcctccctaactcactttatgaggccagcatcatcctggtaccaaaacctggcagagacacaacaaaaaaagaaaacttcaggtcaatatccctgatatccctgatgaacattgatgcgaaaacccttaataaaatactggcaaactgaatccagcagctcatcaaaaaacttatccaccaccatcaagtctgcttcatccctgggatgtaaggctggttcaacatatgcaaagtaataaatgtaatccatcacataaacagaatcaatgacaaaaaccacatgattatctcaatagatgcagaaaaggcctttgacaaaattcaacatcgcttcatgctaaaatctctcagtaaactatgtattgatggaacgtatctcaaaataatgaaactgagtcttgctctatcatccagactagagtgcagtggcgtaataatagctcactgcagccttgacctcctggtctccaggatcctcctgcctcagtcttccaagtacgttgtttctttttaagagcagcagttgtacccagctactttttctagtctcctttcagctaagtatgaccatgtgaataagttctggctaataagatataagcagtagctgtgaaataggacttctagaatattttcttaaattgagagaaagactgacagggtatgcctctctggcctttcccttcttcatctttcctgttcctggaatatggctagaatggctggagattcagcagccatcttggcccatttggataagctgtatgaacagggaagtcatatgataagaaaggaggaacagagagagctaaggaacctaggttctcagtggctttataccacaactgtataccacaactttatacctgctgtagactgccaacctctgggatcaggatctgtctgtaatagttctccatttctgtgtgacaaatcactacacatttagcagtttaggacaacacacatttattgtgtcatagtctctgtgggccaggagtccgggtataggtaatccgggtcttctgctctgggtctttcaggctgaaatcaaggtggctgggactgtcttctctcctaaggcttgggatccttttccaagctcactggttcttaccgtaactcatttccttgtggttgtatctagcaagatgcagagccaggctttgaacccaggcagtctggagtcaatgcctattctcaaatcaactctattgtgcacaccaatcacctgagaacctttttaaaatgcagattcaaattaccacattttacagggcacgtctagttgccttgtaagatctgcctccagcccagttaagcccccacatgaattttcagctaattcttgaacttacttgcctgactccaatgaccaaataggttccatctagaactccttattaaccacattccaagctgagcttttcgtggcttcctaacctcacccacctgattaccgtactgcctggttgctgagctagaagtcacagggatggtcctgccctgctttctctcctactcctgtagattctcattcctgttatctttcctcctgccactgctctgttctgatgctcatcacctcctgtctggacctgtgcaaggatcttcttcatgagccttctttctttctgtgtttcctggcttgtagtttggattattgttcccaattcttcatgcctctgtaagagaattattcgtccatcctcttgccatgaccttatgatggatggtcccttggcctagggcttggtaaggtgacttgctttgtcagattgacatgttcacaagtgtgattggagcagaggcttgaagtgtgcttgcacagttgggcttgccctcttacactgctgcaagcaggaagatgccctagacagcttttggtgcaagaagcatgagagacatgtgaagcagacctgcaccccacttgttgtctggagccaagcccacccaagcccagcccaggtcagccatacttaagcccaaatgcaggtgcgagaatgaaaaataaatgcttattattgtttttgatgtgtttgttacttagcaaaagctgactaatatacagccctaatttactctctccactgccaaagtcaccgttgtgaaacacatctatcctgttactggtatacgatgtccaatttattccacaggataaactcctaaatatttaccctgccctgcatgtaagccaaccttgctcaacctcagtctaccgttcctgtctcattccgtcatgactctgactcatttgacattcagaatacttgaagggctgaagcaggctttggtctttgaccagtctaaacctttgcttctttctctctgcctggactctcatctcacatctgcttcctgccttgtcaattcctgctcattcttcaaagcctgctcaaatgccaccactctgaagccttgcttttctctcccaaaagcggccttttgctgtccccataataatgctgtttgagtgttcatttcaaggcactgcagcagattgtgtctatgacctggcctagcccaatagcttcagggaagtgattctactttattcatgcatgtgttccttacatctatggccaactcatatcctggcatacaatggatgctcaaaacaggtaagtgagtaattttaaggggcatcatttggcagcctgcccttctaggcactgcagtgagcttgtggagagtagattaattcagagttcacattgcaagcagtgctgctgtggttctcagagtaactctgccaggaaatgagttaggtgtgttgaagacttacctgtcctgctccagggcagatggttagtggcatagtgccatagcgggagcatgggactgcaagtcgagagccagcctgcagccctggcactgtccccaacttacccttatctctttgagcttcacattctttgtacaatgaagcatgtagatttgagagtcatcccagctcctgttgactctgatgtccagttgttgcattctgtaggagtttggaacaggagaagtgaagagccataaggaaaaggcctctcacaatgcaattaggggaacctgccccttcctgtgggtaggggacttggctttcaccaacctctcccatacaattgttcttgttatctatttgctgggcagaaatgacacccaaacttaatggcttaagacagtaatgttttattatttctcatgcttttgtaggttggatgggcttatctgggtaggtttcactcagcgacttctatgcagctgtggggctggagttattggggagcctggctgggctgagtacctggtgcctcatctacacagctggcagtaataagggctgttggctggggctgtaaccagagcactggtgtgcggcctctgtgtgtggcttgggcctctcacaatgcgatggctgtgttctgagtgggagtgtcctaagagtgagagttcctagtgacccaggcagaagttgggttgacacttcttgcaagatttctgatgacctagcctcagaattctcagaacaattttgccacattgttttggaaaaggaagtcactaaggctagcccagatttaagggtggggactcagactccccctcctgttgggagaatgttgaagaatttgcagccatctttccttgcctcagcatggaaatatgctaagaatcttggaatttggaaatcaattaagactgaaaaaggccagatgaataggtctaaatattttggggtgctttgaggtctatcctcaaggctggtggagaggctctctttcttatcccatcttgaatcagagcatctctctgaggttcagcttcagatgctattaaaagaagaattccatgggttctaagggtgatgtcatgactagggttaggtgtgcaccccacagccttagcaaacaaatgtatgccgagtgagtttctccctgggtgcccctaggccaatgtaagtgcctacagcagaagacacagatgcaggcctggcctggccttataggagctattccttagtaggcagagctccagggactccctttccctatttggaactttgttaaatttctcactgggctataaatccctcagcatcttgttaactcagttttccacttggaaattgggtgtacagacacaacctgtagcacttgtcatatttctatcctctgctgtatcatgaactataaaaggagctgctaacaggaagcactttttgtgaaagtccaagagtctcatcttcctgggctgtttgttgccattctacctggagtctgttttagtttgcgtttccctccacaatcttgttgcaggtgggcatggggttttcctcgtctctgtgtcctgcttggtgtcttatttgcacacaagaggctctccatgaagttcagacctgggtcgaaggagttaaagagctccacactttcccactgacaatttccttgggaatccctctaggagcctctgaatagctctaacttctctgctttgaggatgttttgctcctaaaagggagagggatgtcttttctcttttgatagattggtggctgagctggagggaggagaggttactcattgcagaggtcagggtgaacagggaggcgaggaggccttggctggccatgctgcttggggaactgctccaagtctgggcttgtcatactccttgcctgcttttagtcatcggggtcattaggctctgtggcacatggccccgactctctccttgtagaagcgtagaaagattggctgaggacaatccaagtccaaaatgtcataaatttgtcacgatttgatttccctttttaggccctgcactgtgtatgtatatttataggtgcttgaggaaggcctgggaattagataactcagggacagttggctgtccgaccacatgttcttggctcctctggagttaacgttagtggagaaaatgcaaaagcaataactggtccctgtgagggcagtcttcattctgcctcttccctctccccagagtgagtggttggttcatctctcttttttttttcttgcatttttttttttttttttttggagacagagtctcactctatcactcaggctggagtgcagtggtgccatcacagctcatgcaacctccgcctcctgggttcaaggtattctctcacctcagcctcctgagtagctgggactacaggtgtgcacccccattcccagctaatttttgtatttttagtagagacggggttttgccatgttggccaagctggtctcaaactcctggtctcaagtgatctgcctgccttggcctctcaaagtgttgggattacaggtgtgggccaccatacctagctggttggttcatctcttaagaatgaccaagttgaatgattcttcctagtgtgtgtagctgttccttgatgggggctcaggaacaacaggaatgactctttctgggttgacaaagccagacaatcctgtgccttcagtaatggaatctgtcttagtttgagtttccctccaaaagtagaacctgagaagagaaagttgagtgcaagtagttttctgggaggtgaacccaggagtcaggtgggaagagcaggtagaatgagacagagaagaaaaaagaatcagtttgagaatgtgttgctttgagcagcaggacttgattttgctcagacctctgagaagcaggatgagaggctgggacacttatctgtgggcctggctcccctgctggttgtggtagcccctgggatgttcacctccctctcatctggctgctctgctactggacctgaaagggtctggtgcactgtggaagcagaccctggggagagagagcaggagaacagggggcatgtgcatgtgcttgaggcgaaaagctatcattgctggatgaatctgagctcctaaggaaatgtccaccactctgcctggaatcagaggtgggctgagcagacaggatgtagagcatcttttactttcaactggggaaaacctctgatgatgtcttcaaccgaaaggaggcatgggtccctaagacctactctataacagggaacaggagcaatgggttaggcactgggcttgactaactctgcaatgtttaggacagaattgttaccacacagaagacccatcactattgtttcctcctggctcttctttgatcaacttcaggtagtttctcatctgagaccaaaaagccacccatggccccttctttgggttaaaaaatattccaggtcatgcctactctttttttccctcccgctctacttccttctttcatacacacacttgtttgctctctcttgtctttctctttctcttccatttgtcctccctctgtcctttcatttcttcaatttccctctccttccttcctccctcttcctctttttctccctttatttcaacaattattatttaatttccaaatacttaaagattttcaagatttctttgttataaatttcgagtttaattccatcggatagaggatatattttgtatatagagtacgtattttatatgaattgaatgattttaaatttgctgtgatttgtttatggcccagaatatggttatttttggtgaatgtttcatttgtacttgaaaataatgtgtattctgctgttgttggatagaggaggttctttttttttttttttctgagacggagtttcgctctgtcgcccaggctggagtgcagtggtgccatctcagctcactgcaagctccgccccccaggttcatgccattctcctgcctcagcctcccaaggagctgggaggcgcccacctccctgctcttttaatttttttggtgtttttagtagagacggggtttcaccgtgttagccaggatggtctcgaactggatagtggaggttctttaaagttaaataagttttacttggcctgaagtattgtatagctctcccatatccctaactgctttttctgtttacgtgctctattgagtactgagaggggagtgatagtttctccaaatataattgtggatttgtctattctccattcccttttacgagcgtttgtttgatatattttgaagttatgttgttaggcacctacacacttagtattgttatatcttcttggtaaattgttctctgtatcattatgtagtgatactctttatccctggcaattgttcttgttctgaagtctaggaggtcttattccttgtctgatgctgatacagcattctagctttcttttggttagtgtttgtatggtgtaccttttcccacgcttttattggttatctatcttgtctttatattaacgtggatttcctgttgaaagcatgccaatttgacaatctctatatttcacttgggatgttttagaccatttagacaaattcgatgtaattattggtatagttgacttaaatctatcatctttctagttattttctatctgccccatgtgttctttgttttgttttgatttttttcattttcttgccttcttttggatgtgttggatattttttatgatgctagtgtatctccactatcggcttattttgcatatctatttttatacagtggttgctctagttttcacaatgcacatctttattttatcacagtctaccttcaaaaaatattatagcactacaaatacagtataagaatgttaaaacagtagatttccatattctctctcatcctctgtgtattgttgccatatattttactgatacatattttataaacctcaaaatctattgttactatttttgatttacatagccaatgatctttaaagttactgaaaataacaatgtgctttatatttcccctcatttttaccattttttactctccattttaaaaagtagattcaaatttccacctggtaacatatttcctctgcctgaggaactttttttaacatttcttgtagtgaaggtctagttatagtaaattatttcaaatttcatgtgtttgaaaaagccttcattttgctttttcaaataatctgatttgacagttattttcatttagtattttaaagacatcactccactatctttctgctcacctggcttttgatgaatactctgccataattattctcattattcctctttatgtaatgtttattttttatctagctgccttcagatttttatctttggatttcagcagtttgactatgctgtgcttgtgtgtgtgtgtgtgtgtgtgtgtatgtgtgcttgtgtgtctatgtctgtctaactttatcctgattggggtacacagagcctctcacatctgtagtttatagtctttcattaattttagaaaattattggctatgatctcatcaatgtatttcttctgtctaattctccctcttttctcctcttaggacttaaattacatgtatataagaaaacttgatattgtcccacagattttgcataccttgtttttttgccttttgtgtttcagtatgtatagtttttattgacctaccttcaaattcactggattcttgcttagttgggtctagtctgctaataagaccatagaaggaatttatctctgaaattgtgtctcgcatttgcatttgactcttgttttgactctgctgaaattccctatctatctgctcgtgcatgttgttttaactttttccattagatttttaacatcttaatcatagttattttaagtccatgtctggtagttctaacatgtaagctatctctaagtctggttctgttgagtgtcatatctttctacaatgtgttgttctttcttgcttttttgtgtcttaaaatttttcattgcatgccggacattgtagaaaaagagtagagactgaagtaaatagtatttacacaagaaatgggcatgcctcttctttcaggctgtcagcatggatggttcaatcaatctcatcagcaattaagctgggttttgattttgtagttgctatcacttccttcagtacatcacaggcttcatatacctgtatcagtggacttttgttagtgtggagattggagtgctagagggattgtttctgtgttcctgttttacacacagctcttaacaacagtacctgtgtggccagtttccccgaggttttgcccctccccagtaatagtctctgttgctttttacttggcattcatgatggggactgggggtagaaagggtctcaattttccttgtctagcctcagacttaggtaaggattctgtacctgagtcttgaggatagaattttatcagcatattccctccccacaccccctgccatggaaaccaaactctgttttgtctttgtgttgtgtcttggttgggaaagagtttcctgccccttacccagtagtagcaaacctctgctttgtcttggtgcaggattctgagctcaagagcatttccttcccctaatctagcagcttaaagctgttgcttcatctgaacgtagggtctgggaagagggcacgatgtgtacctgtattttagtggcatcacctgcacacctgctccactctggggatgttgttccagtctcttttctcatgagttcctggtgagggcccatggcaaagaatgtgtgagtgactgtgaaccctcctggtgtctggggatcctcataattgcaaacagatatgctggcccagacatgacctttcaaattcattaatattttagctgatatcttcttgtctacttttgtggtgggtgcttcttcttcctgtgctctgacaaaggtgaaacactttgtgtgtcccatttctccttagaggggcttttcgccctttagaattttgttcatttggttgccctgtgacctcaacactgatgggctcaaaaaagtttgattttgtagatttcctggcttttcctcattggtatcatggggagaagtattcttttttggctttccacatcctaagtggaagtggggcaactcttacctgaatgtctgtgatatgcaggaaactgggacaggccctggtggttgagtttgcaccatgacttgtcccttttgactaatccccatcagttggacaactctctggccacctttttgatttgtggagtagccaccacctggatttatccctcaactgtaagcaccacagtcttggggaaaagaaggtaccattccacttctgtgcctgacattctgggatactgccaccccccaccctaacccagcaacacttgcctgggagagacagtggacacatctcatttgccatctaagggcagtgtggtagaaggggagatcagttatgttgtcagaaccaccaactccatgagggcatgaaccaggtcagatgtaccttttagcttgtggctgatccctcttttccagtttaagcaagtctcctgaaccctgggtcacagttttcttgcctgtaaaattagaggttggactaaattatcttggaatggatggccctcagaccgtggtgtgccagtagttcctggggctgtggattctatctgcacatatgcattttctcactcaagaggcaatgaaagggaactgctgttatgtggggttaggagaaatgttctgtgttaagagcagtgctcaggtttgggaagaaggagatacctgctgagcttctgtggttttcaaacagggtttctagctctgccccatttcatccaggacaagcggagacttcacatagcttatttcttgggcttcccctcaaatgtctgtttgaagaaaaggttttgtgaaaaaaaaatccactcagaaatcaggtcagtggttgcctgggagcagggagtagaagcacgggcttcaaggaggtgagagattttttggcgggcgggggtgttctgcatcttgaatatggtggttgttacaggagtatgaatcttggtcaaaactccttgaactatatattaagatgggttaagtgtgttttatgtaaatcatacttaagttgatttgagaattgaaagccaccatttcggaccagtgtttctcaaacttttaaatatccattctcctttagattagactaaaaacctcacacttttctttagttacttagaattttgaaatgaattaactgtagtgggaaagattaaatcaaaacaatgggaattttagaatatgctctgttgatttggagacaagaataataaagcaggtacacagttttgaattattcggagtttgtatttgcacttttttttttttttagtgtgaaggatgttttcaggactctgggaggtgctaatctgggaagtttcagataactttgataactaaaatatcattttttgataactatataatcatattaatcataaacatttattgatgcctactctgaggcaggcacagttttaaacagtttatagaaatcaattcagttgatcttatactgataacagatagactattattataatctccacttgccagataagaaactgagtcccagagaggtcatgcagtttgcctagagtcacacagttggtaagtaggggcactgggatttgaactcagatagcataaatacagaatctttacttttaacttctactgtactaccccacacttaaaataacacaggggacctggctgaactttcagggattcctctgtagaatctttgtgcaatttttagtttgtttagttttttttattttttattttttaaaatttactttaagttctggaatacatgtgcagaatgtgcaggtttgttacataggtatacccgtgccatggtggtttgctccacctatcaacctgtcatccaggttttaaggcctgcatgcatttggtatttgtcctaatgttctccctccccttgcccctcaccctctgacaggccctggtatgtgatgttcccctccccgtatttgcactttttaaactttcatttgtgtgtgtgtgtgtttctgtgtgaggataaagtattattgatacatttgaagttccctttggctaccaccatttcatctctgtctcattttttcctccctcctttttcttccctctttctttccttctctcccttttctccccctagaggcaatagtataaaaatatcatgtacattcattcttccagtctatttgttgacatcttttcatacacacacacgtgcgcgcacacacacagacacacacactcctgaaaacaaagtcttattttgaacttttgtttgtaaatttatgcaatcagtttcagagtatacagctcatgctgcaatttgctttattctaatcaacatttttgagatccactcatcatgatatgtgtctaggtctcggtaatttttttaaccttttactgttgtgtagatttccatcctactaatacagcacaacctagttttcaatttcccttgttgttgttgttaggtaccgcgtggctatgaccttccttgcacgtgcagcagggtttctctagcttaaacctacaactgaaattcctgttttatggagctagaatatgcttctttcccaactacacatgtacattccaattctcagctgaagattgtgatattcacatcttctccttctgttactttggctcaattgagggtcacagctgtggactgtgaatgttgtcttgtgaatgtggaccgtggacggtgaatgcggactgtgactgtgggttgatgaatattttcttaaagagccaaaaagtaaatatcccaggccttgctggacaagagttaaaatggaggaaattatgtatggagaatacttaaaatgtaactattaaaaaatgtgaaatgtgaaaataagctgggtgtggtggctcatgcctataatcccagcactttaggaggctgaggtgggaggatcgcttgaacccaggagtacgagaccagcctgggtgacatagtgagacacccacctcattaaaagaaaaaaaatttataaaaactaaaataaaataaaaatgtgaaaatcaaatcatccttagtttgctgtctgcaaaaagcagcaactggatgtatttagctaatgcactgtagtttactgacccttgtcctccatggtcttctagttctaatataaacttacttattaacagaaaaatcagtgcatgtgttgatacacacacacggtttttgagcagggtgagaagttaggtcgtttgcatacacactggctgtggccagcctgggggaaccagtgtcccatttcctagaaggctgctgttgcccttcgctctcagaggcagcaaggcccaagactggcctcatttctcaccccaaggtgccccctgcctctctgccttctctgcaggttcggtgccccttccttggtgagtggacacacagcactgatgctctgtctgcagtgggcatttgcaggtgctgcacccaaaggcctgtcttccttagcaccctatgacactgtcttacaaggattgtgaagtatgtgttgggcagggtctctccagtgggctcaaggacaaaatgctgtgaggcgtttggagggacagtggaagggagagccacaaaaatgggccattttgaaaatatgaaatcaggggggtcaaagggttcagggcctttttccaaagacagggtcggaatgggatatagacaaggctgatagggtggaaataacccacctggcttgttccctgagataactagaggaagtaggattaatggaataaatgacagttttgaaaaggctcaggtaaaagcagttgtttgtaaaatccttgtcctaggcagaatttggcatggccatttcctgtccttccaatagcaccgcattcagattcaccgtgaccactaacatccagtgtactttttaccatttctttgtaaggcgtctctacaatctctttctccaacaactttgaagttaccatctaggaggtgcctgccctggggactctgtaagttcctctggtacaaggcccatcatttgcagggagtgggagggattacaggaagaggcaaagagcgaaccacccgtgtgcgtgtgtgtgtgtgtgtgtgtgtgtgtgtgtgtgtgtgttggagggaatagagatagagaaactttcccttttcacaaatgtcaaacttgcatagaaaatactgttgcaaggccgggcgcggtggctcacacctgtaatcccagcactttgggaggccaaggcaggtggatcacaaggtcaggagatcgagaccatccttgccaacatggtgaaaccccatttctactaaaaatacgaaaattagctgggtgtggtggcgcctgcttgtaatcccagctacttgggaggctgaggaaggagaatcgcttgaacccgggaggcggagattgtagtaagccgagattgcaccactgcactccagcctggcgacagttcaagactctgtctcaaaaaaaaaaaaaaaaaaaaaggaaaataagaagaaaacaaaatactcttgcaaatctgagtgcccacttaaattctgtcaatttcacccagtgtggatgaattcagtgctaccactgtcctctcccccaccctgcctgcctcttgctgcctacctctccagattaggacagccctttttgtatttccctccagcaaacacgctccctactcctatccaagccccattcattcaatagagatcagagaagacatgacaacaaagaagagacacaactgactgaaattcttcaagacccaggatgcacctgagtccattccaggccccacacctgtggaatggggcttatgccacggctctgcgaggcagtcccatgaaaagatgagctggaactgtcagagatggtggaccaggtgaggcccctggccttctttttcaaatctctctacatacaccatccatctttgcagcgatgactacgcagggccggaggtggtaagctggcagggctggcaatcaggtggaggtttcccactgctggttttgtcatctattgactcaagcatcctgccttttacctagagcaaacaactcagcaatgaaatcccatgattccccagagcttgggtttgctgcaacccacacatggagggctaaattaagctgtttgcaccttggctgacatcttctaaatggttctgtggataatggtgtttatcccctgtagagacggggcgacacagagggaagaactcaaaggtaggattccttgagtaaacaaagctcaccggtgaactaaccatccccgtttaaatatttaaattctagcttcagtggagaggagaatgtgtcattaaatattgtcaggctcctgtgtttattcccatttcagtaacacggggtccactggagagtgttttatccccctctggcctttgtgcgcactgctccctgagccaggagcctgcttctccctcccactcttcctggctgaccttagtcaggggtttgacgtcactctctagctgcacctcccacgctcctgcagtaccctgcactctcctcatcatagaactgatcagagtgggttgtaattgcccatgcacttgtctaagtcctcatgagatcagaaatagctgctgcgttgctgtcctcacagcctggaccaggctgaacagagctgagctggctctgaaatggccaaaggcacaaaactcaaagagcagattcccagagttcaagggtcagaaaagcaagagtcctcttcaagccagtggcgcagtgaaggtgcggtgaggagaggcaggcaggcaggagctgcgggcacggggaccaggccttggagtaaaattcctggtggctggagttccagatggcagcggtgaactgtaccagggtgcccaggactcactccggggctgctggctgaggatcaggaggggcaggcaggggtttcatggtgctgggatgggccaaaggcttaacactgggcatgaagagtcctaagctggttctagaagcccaccctgaggggtgcctggcctccacagcactggtccagagagtgtggcaaactcaggagtggctcggacatggaagctccaacagtcaggcaggtgagatgctgcataccaggcaagttcaattcatagcaggattcatctggggcttggggatgtggagtgcaggagccaggccctggaggtgggagatgataccaatagaagggtttcagggtccaagcagagccagcgaggaaaaaagcatgagcttttattaggctgggtttcccagaagcagaccccgtgacaaggactccagggcaggtggcttatttgggaggtgaaggaaatggggggagagtgaggcagtgacacaggaaagggaaggccgctgaggtgcgttatgcaatgaatgactacagtggtagctggggctctgtcctgctgggagctcaggaagccagggtggaacacgttaggattgccccacctgaggagtgagggagctggggcatttacccaccacgtcccatcagccacttgttgagagctggtctccaaggacattgatttattctccctttaaagtgactttagtaccagaggagaccctcagacagagatgggggtgctggcagtgggaggctgggccagtgtgcactggattcatcaggcctgagggctaagctgctacaagcttcaatgtaaacactcatccctggagtatctgacctgagggctggttttgagcagccagactgcgtcctgtggctatgagcgcacttgagcaggctgctgacacacctccaacccgtggctctgcatgtggctacttctgcaggcagcagctgccgggactccccctggactgagtcacttgtgcagagacaccctacctggctcctctgcatacccctgtcctctgggcctgccgtgtagaagaccctttggaactactggttgaacagaactaaaatccagtttgggagggtcaaagaggagaggggaccaactgctcacttgaaggtcctgaggccaccatcagtgacctatatcccagtaggaatgcccaccacatgtgagcccttggtaaagagctgcagcagccatattaacatcagctgatgtccacagagagctttctgcctgccaggcatggtgctctaatgctcacatacattctctctttccgtctgcattaccctcctagctaggtcctgaaagtatccgcactgtacagatgaggaaaactttcgcccaaggactcagtttctcttgaacttcttcttggaaagcagctgcacgtgggttacttacctcttccttgcctggtactgtgaatgcacagcctttcccaaacccaggctggtcatgctagggtgaactctgagcaggatccttgcactatgcgagggcggaagtggacaggactccagctctctttgagctcagccctcatttcacagccagaaaatgccttctgcaaggtcacagagcttggcctagcagccccctctgtggactccaagggtagagctgtagttattcctccacagtccctctcctgtggatcaaaggcagtttctaaaataatttggcttatgtagcccattttctgggctgtattttctcagatgaataacttttttttttccagtgggtaagtggatgacttatgggattgtcatgcaacgtttagtctaggagaaaaggccaatttttggctagagtcttgtggctagtaagaagagctttgtgaccagagcaagggctgaaccttgggaaaaaacactgaaggaacctgaggcagcccttccctcaagtgtcctcagctgcctggcgctgaggtaggtctggcctaagagcagggctgggcaatgcccttggaaggcccgctttgcctctttccctggtttcaaaaacctcacatccttattccaacaccagggcattgtctaggagaatgattttgactgttgctgaaaaggcatgtttcttcctgagatttttggatgagtttaatttccacttgtgaaaagtgagagcagtgtttttcccactgggtcaccatcactcttctgccaagcctcactctccctcccatgtgctcctctctgccattggcctgggagggcccagggtcaaccttctccttcaaggccctggaatgttgtatctctgtcctgtccaactcatcctccctcaggccccaggtttccaagagacagaaaacccgcgtgtcccatttctatatcttctatttgtccacatccaacgcggaactaggctgtggttatttatcatgactgttccccaatatcacctgtctctagaattaacctggaaaatgccaaacttttccatcagatcccggggtggggtccaacattgccaggcagaccccattctctgtgggaactgagagggagtgggtctcgggtagaaggcttccctggaggcctccttctccacgccccactccctcagcaaggccacagccatgttcacatagtgacgctggaggaaaggtagtgggaggtggtggtgatggaggtaaacacagcatggggtcccagaccagactgcaccattgcacgtgcctggagtgcttagagaaataatcaaaccttgggtcttccatcagttagcttttcctgcataacaagctctttcaaaacttgatggcttaatttgccaagaaagtagattttagatgctcttaccatccacctcctccaccaaagaaaaggatgtgaagagatggatctgttaatttgctggactgtgggaatcatttcactatgtagatatacatcaaaacatcatgttatataccttaaatatatacaactagaagaaaacacttaatagcttaaaacaccagccatttatttagctcacagttctgcaggtttattgcaggaggtcaaagcctgtcatttggataagcccagagtcatgtgggatgggaccacccagggccgtgaatacggagaggtgtggacaaattggagcatggctgctgtcattcaccagatctctactccagactagaatagagccaggctctggggatgccatgactcaacttttagcccatttcctgggtgattctcacacagctgcagcacagaaagtcaattggggaccactgcaaacagtgactggctgggattcccacttctcattgtaacatcatcatgagttagaagtcaaaaacttgcaagtaatgtaggtgcctgaagtgtctggtgtggggcgacctggagtgctcagcccaggaaacacaggcagtccacagtggaaggaactcaaattcagttttgctacatgctgaccaggcccggtcttgtgtccgagtggcatgtggctgtaagctgctgtccctggtgggctcagctgtatggtgactctttcacagactgtaagaaaggccagtggtcctggaatgagggtccacatcactccacgcagacccccccattttcatcccggctgtcccaaccgtcgggtcaaagcagggagaggtgctcagcggtccccgcttccttttttctttgactccagttcagcctcctgctgaaatcttccctatcatcccctccacttgcctgctttattttccctccttaccaccgtctgatgtagagtttccccgtgtatttgttcactgccccgctctctcccacaagaacataagctccatggatggactcctgtgtgttctgtccacttcggaatcctcaggtcctgctgcacagtgagcccttatgaatatttcttcattgaatgaggcccccttgctggcatttttcactgtggttgtttctctttgctggccaacctggcctgcacccccctctcagccctctgtgccttgctctgtggatggaagctgtgttgatggcatggagcttcctcccttgaaggcacatcttcccccaagtccatttgcattgcaagaattttctcttgaggagtctgagagagatgataaaatctcccaatttcctcagagccaggcctcacctggaggcagaggcgggagggagggggcgagggaggggcctgagtgttggaaggggtttgaggctttggcttccagtgttcctcccatcccaggtctagaacatagaccattaggactagaaggtccgtagctgtaatttgtgccagagaactagagatggggaggctgtgtgagtgtctggtgtgggacttgctgcttagggaatcacaagaccccttacctggggcattttaatttgtgcccccaggtcttacaggtgaggaaatagagctgcagagatgttagaaatttgcccagggccccagaaccgatgtgagaccccacctcacacctcccacctcccaccttgttccactatgccatcctgtccccctatatcttgagagggtgagcaagatggagtttctttaccaaacccaattttattatattttattttttatttagaaattaaatttttaatttaaagtatttttttttttgttgttgttgttttaaatagagaccaagtctcactgtattgcccaggctggtcttgaactcctgggctcaagcaatcctcctaccttggcctcccaaagtgctgggatttacttgagtactcctgaagcaaagaatatacatggaccctaaaacatttttagcaaaagagaaaaggattttacaattttataaagacaaaaactgccaggaggcctggggtcaaattgttcaagagaaaaccaaagccctccagatagacttttgataagtcagtttaaaatataagggacaaggagagcaacatggcaggactcagtctctgtggcttttgggggcgatgtttccgcagcacaaatttggtactgtcatttctcagacaccatcatccaactgcttgttttccatcttgctggaagcagccgtgagcagcccaggctgttttagatcacggtttattggctggagatgtggagcatttccaagggccaaatgtttcaggcagacacaccatgttcctattaggaaactcgggacttcttggatgagaacatctcacataaaacatgaaaattcagcagttccaagtatcagagaagttgcagatctgggtccttttccagtatgcctcagaacatgtccagacgacccactggaaatggcatgttgctttcggatgctaggagggtggcctgcagaggtctcccatagtccagtccacacggggctggtggtgtcaccccaccaccctggggctgcacctccaaaagggctcagcttcacatgacactccttcagaggagatgctctgggcttcatctgtggggcagtggatttcccctcagcctccctcccaggggcctagcagaaggggaggctaatccacccctgccagagcgtcccagattgtaactggatctgtgcattggggcccatattgcacaaggacagtgtctgctcaacttgcctcccccagcatccttggctttaatgtcaacagccagtgcctgaagccaaaggggtgctgattctccattggtatccgtggaaggacataaaggggccattcaccggcacctctcagagttgtcaaccacccaagagacagctaccaagagacaagcctgggcagaaaaggtctatggggatgagcaaaggagagacctggacatgagtgaaagcccagccctatgccctgaaaatttgggagccacataaatgttggaaatgtttccctactaaagggatcctactgggttgtctgaagaccaagaagggaatcctacgggctgccagaaggattcattgtcaacttccaaaacaactgtctgagcccagcaataatcagtaggggagttacagacaccctccagtttaatggggttattattcatttttgtcctcaaaggtatatgttcatgtggaggccaaagcatctccatcttgaatgctaatctgccatgttgacttctgatgaacctctgttctgggaatgcctctaagatttctactttatctactaataccaaaaatcctacccttaggtcaaatcaagcttgaccataggtcctgtccttaggcaggttcacatagcattcttgcctttccctggtggagaagtgggggcttggcttcaattgtcctacacattacttccctatggcatacaagccctgggtctgggggtgatggcacagggatccaccaccttgtcttgctgtcccccgagatacagatgtggcttctgttcctaagtccctgttaaatatttctttctgagaaactgcttatgtcagcctctttcttcagcctctcagcttccttgaactttttgggggtaggtctgcatagaacagtctggcccagatctctgccctgaaattcacgtctatctatcccactgcctatttggcatctccactcagatgcccagcaggcatctcccatttcacatgtccaaagcaagctccagtcacttccccatcaacacctcctcttcctggtctttcttgtctcagttaattgcaagtctacccttctgggagtgtaggcaaaacattttccaggcacccttgatgcttccctttgttcacactgtgcatgctcctggtggcttgaccttcaaaatatgccagaactgcccatttcttacagcctccatagtccccatcctggtccagaacactgttaactgttgtgtgcagttttgtggcagtctcccatctggtcaccccttactatccttcctcagcacagcagctggagggattctcttaaaaacaggttggattgtgctgctctgctgcaaaccacgcaatggcttcgcattgtactcagagtaaaatacaaagttctgactgtggcctagaaggccctgcatattctgggctgccatcctctctctgacctcatttcccaacctgctttccatgttccttcctcaggacctttgtgcttgctgcacacctctcgttgagctagccatcattgaaagcacctttgcaaaatgataatagtaacagaaatttgacagagttgactccatcttgcttctaacctgcaagctgtccttgattattcctgggcataggccaagctaatcttgggagaaatttagtttatagtttaatcttaaaacaaggatgcttggtcaggcatggtggctaatgcctctaattccagcactttgggaagctgaggtgtgaggattacttgagctcaggagtttgagaccagcctgagcaacacagggaaaccccgtctctccaaaaaaataaaaacataaaaagaaaaaaaaaaagaaaaaacagtagctgggagtggtggtatgcccctgtagtcctagctttttgggagactgaggtggggggttgctggagcctggcaggttgagactacagtgagcagtgattgtgccattgcacttcagcttgggcaacaaagctagaccctatagaccctatctcaaaaaaaaaaaaaaaaaaaaagatgctgttagcccttcccaaactaaactgccttcaggaaactaatgaaaggtcacaaggttagtattttgagaggagagcctgaattctttaagatgtaggcttagttaacaaataaccagccattgttttggaggtcacaagtgttgcaacgtcccagattgctcctatagataacatcactactgtagaacctaagattggtctcttgagatgttttttggacttttgcattcctgataactggctgactccacccagaccaatgactcatgactgaatgagtcctgtgacccctacccaggagctaacaaagaacaattcccacactcctatgatttcatccccaaccaatcaacattccccattccctagccccctgcccagcaaactatccttgaaaaaccctaacctccaagccttccagactaatttgattgagaacttcatcccctactcaccaattaaactttttttttttttttttttgagaaagggtctcactttgtcatccaggttggagtgcagtgctgtgatcatggctcactgcagcctccatttcttgggctcaagtgatcctcccacctcagcctcccaagtagctgtgactacaggtgtgtgccaccacacctggctattttttttgtagagatgaggtcttactatgttgcccagctgggtcttgaactcctgagctcaagcaatcttcccaccttggcctcccaaaatgctgggattacaggcataagctgccacgccaggccataaactccttttactttcttctttttttttttttttttaaggcagcgccatggtcttagtgaattgattttgtctgtgtagcaggcaggaagaacccattaggtgattatatctccaggcagtcaagtgatggcttccaccagctctactatggtagatgccttggcactttgtccatctttaaggtggctcagatagatactgctgatgcctgtccatagccctcagtgctcgtctttctcatgtgtgtcaatggcatccttctggaagcacctgccactctctacatagtatgctcatggcttgcatggcacaggccaggtgggctttggaaattacccttccttccttgtccattggttgggacaattctgaagcacatttgacatggtctcccagagttccccagcagaatttccgttgcccatagtgttaactgacctgatagcacatgtgttattggcttccttcccttccccactttcctatgtgtttacttggatcaccttccaaataaatcacttgctgtcaaatactcatctcagggtctgcttttgggcttcaagcctctgctggtgtgacaactatctagggaggcatccaagtagccaagaccccatctccttgtgactcaaagctcagtgtgcaaagtccctctttcctagagcagttattgttcatgacttcacgtaggcaaatgactgtaggtctcaaaaatatagaagcagatacatcctggaggccaagaaagcagtcctgctgtggttccatatgtgttccttatggcccaaagcatctagtctgcagttaaaatacccatgcagacccaaagaggcactggctgaagatgatgtagcaggggactgtggctgggcttgagctgggacctactttcttctgccaggaggttgggtgatttcccaggccaagtgtctgcatgttcctgtagtcctgctctgttcctcgctcacatgccaatggaccaccatccttgctggtgttagtaatttaagctttgatcacccaggggggagggaaaatcaaccttagttcctatgagaccttggagtttcagagcccaggttttgcagattgtcctggtaactatggctgtggagcaaatcatcttaaatctagtggcttaaaacaatgacaacatttattttgctcataaatctgcaatttgatcagagtttggcagtagctcatctctgcatccttggcatcaactggagcacctcaaaggtcaagggctgaaatcttcactcatccatgtgtctgggagttggtgctgggaagatgtgagcagccagagctgggacagcaggggtctacaggaatctctctctgctctcagtggtctctccatgggttctcttcagggtgatgactttagggcagccagacttcttacccagtagctcagagctccaaagctacatgtcctgagtgagagggatcctggtggaagctgtgtgactttttatgatttagcctaggaaattatacagcatcacttctgacacattctgtgggaaggagttataaagcttcacccatacttgaccatgttcggtaaatataatctgccacacagatctttgatttggagtctgatggtgtgatgttcctcatggcccaaagtatctagtctgcactgaaaaagcccatgcagacccaaagaggcattgactgaagctgatgtagcaggggattgtggctgggcttgagctgggacccacctccttctgccaggagactgggcgatttcccaggccaagtgtctgcatgagttatacatatgccttgctgatgctgttgttgaagagagaggaagatttttggtagtaaacaaggaaagatgaaatgaagggagggatggcaaggggtggttccctgcccagcctctgagactgcttaaaattcccagggggagagccagagacaaaaggcaatagaacttgtttacacaaggtgttttgagatgctgagcacaagcatccatacttcaaggtccaggcaaagaggtgcagcacagaataggggagcaaggcatcctgttctgctccggcaccttgggaatcagggtttgggcagctctgggaggagggatttacaagagtgtgctcacggagggcactgatattgatggccaaggaccatgacaagggcctgcaatagaacatgggaatatttgtgcctttacatctgtaaaacaccagctgggaacattccaaaatagtgggaggagatgagggaggacctgtgtccctgcatcgccaggtgcagccttggagctgggacaggtatatgatgtgagtatgtcctcatcgtgttcatagtcacgggtgtttggggagggtaatagaaggttaaagatacagtcacaatcatagccatttttggtaaattgcagtggcagtcatgtctgtgtgtatgtggctaaaaagtgaaagacaaaagttgagtgggtgagtgtgtaagactgacatttataccaagtacctgagtcattctgaagcaggtggcctaccacatggccttgttgattaaaaaaaaaagaccactcttccatgacatgtctgctacactgagaatcctgtcatttctgtggctgggatttgaatctcagcaggagaagaggagttgggaatttttaactgaaaagaggccatatggcttcagtgtttcaatatggaagatgtctcctagagacatcctggggacattgtagcagtcctggacctctccagaaggtggtcaccatttcatggcatgattttttaacaacattcacaggaaatttataattccttcaaggaaaattatgagacttctaaatgctactgtgtccaatatatttttatcattcaaaaaagattttttctcatttagcaaaatgcatgttgacttttgaaaaatcaaagaaaaatttgaataagcaaataagataaaatccctttacatcttaacactcagatatatccaatattaatagtatatatacataaaagacacaaaataataaatcataagtgcctgcatttctcccctccttttctgagaagggatgtctttattattctgggtagagagattggtggaaaagaaatctggacaagctgagagagaccaagttgatctatacaggaaagggcatggagataccagaaggaagaaaaatagggaaggggaggaatttggaagagaagggggagggggtgcagggagagagaagaggagaaggaagagaagagagtagtgaggaagaaaggcagaaaagctgggagttttggggaatgggaaagatcaaaaagagaataggaggatatcccaatagatgtagtactgagtagaattttaaggaaaatatggcaaaatatgattattaaagaaatatttgtggccaggcacggtggctcatgcctgtaatcccagcactttgggaggcctaggcgggcagaccacaaggtcaggagttcgagaccagcctgacctacatggtgaaactccctctgtactaaaaatacaaaattagctgggcctggtggtgcatgcctgtaaacccagctattcaggaggctgaggcaggagaatcatttgaacccaggaggcagatgttgcagtgagctgagatcgcaccattgcaagccagcctaggcaagaagagcaaaaaactccgtctcaaaaaaaaaaaaaaaaaagaaaaaaaagaaatatttgttaaacacaccatcagaaaatttattaacatacattacccttcagttctggcttgatgattggagttgtattaaagcctgaagatgacccagtattatgacctgccattttttacttaacaacatgtgtagaacataacctttaatggttacataacattccactgcatgaaagaatgtactataatttatttaattcattcctcattggtgattgggattatttctttttttttggtatgattctaagcaatataccaatgatgaataaccttataaaaaatcttcatgcacatgtatgatgatttacgtataggatgacttcctttggatacatttcttaaagtggatttactgagccaaaggattataaaatattatagcttttaatactcattgctggactgtcttacagaaaacttaactaactcttctcccattgtgagtatagctcctcatctattgattctaaaccatcttcctttgcattgtaacaatatcctgagagtaagtcagccagaatgtaagctccggaaaggcagcagttctctctgactttacataacatggacgggagctcaatacacacctttgaatgaatgaatgattgacgtgctgggtggctggctggctgggattggagtactcaagggcagggtttctatttatccgaagccctctaatgtctggtacactgccaggcacaaagtaggtatctaatgctaatactctcaggaagttggttttggtccagctatattgccatctgggagtcagtaatactttttaatctaagaaagtggatggttgacttgaaaatgtctgaattcagaagaagtctactgccccaagaatgggttatatttcctggaggattgtctaccaatatttagtacagcatccatgctaatgacttctgttgataagtttctcttggggtaggcccaatctgagtaaatctttgctgtcttcagataacagaccaagcaacctcttggacattgctttaaaattctgtgttgtgaagattgaaggacagaacggatgggaggcaactagcgcagtgcctggcacagagttgcccctcaaaaatggtgcctgttactgtgagtaagtccatcactcatcagtgttgcctggcctcatccatttaagaataaagtgaggctgcgtgtggtggctcatgcctataatcccagcatttgggaggccaagacagaaggatcgcttgaggccaggagtttgagaccaatctgggcaacatagggagaccccgtccctacaaaaaatagaaaacttggctggatgtggtggtgcatgcctgtagtcctagttgcttgggaggctgaggttggaggatctcttgagcccaggaaatcaaggctactgtgatccatgactgtgttacagtaggtagctagtcagtcatgagcccagcaggagagggctcccgccaccaccaggaatgtcaggtgaccatcaggtgatgatcaggcggttgttacattgtttctccaaagtaataattggtcacagccagcaccagggaaaagcagtctcccaatagatagaaaaacataaaactggtgatcagcagcttctggataagatctcaggagctgggcgagtgggctcatgcatgcacactaagaggcaaaatggtagagcttaactggtataacctttctctagaaacactgttaagggaacacctcaagtgagcatacacacaacttcagtaaacacactacacatgaggcccctccaaagtgctggaaggccactgtgcatgcttacatcccaccccaagggaagaatcaggggagaagtaaggcaagagccagaaggatgccaacacataaaaccccaagtccaaaggtcaaaccatgatctctcatgttacccacttggctctctttcaagtgtactttatttcttttcattcctgccagaaaactttttaataaactttcactcctgctctaaaacttgctttgttctctccttctgccttatgcgcctcatttgaattctttcttctgaggaggcaagaatcgaggttgctgcagacctgtagggattcaccaccagtaacaattgcgccactgcactccatcctgggcgacagagcaaggccattcctgtctcttaataaaataaataaaataaaaataatgaaacagcaaatacctcacattttgttagcttttgagtttatttctccctatgctgctacgagttagttagtttgtatcttttccattttactattcaggaaactggggtttggagaggaaaggcgacatttctgccatctcacaatggttagcggtccgtttgactcaaggaatgtgcgcagcatcagttttagtcactgtgtaaattccaccttgagtgtagctgcccttttgaccagtcagtggagatgaagcacagagccgcctctctctcttgggcactgctggttgcctggtgcttgttatgtccttgatgaaggtggaagccattttcatcacagccgcctttctgacatccaggcaggtagaggccaactgtgtttaagaagctccactgaggtcagacagacaagctgtgatcgctcaggtcagacactgtctgtaaaaaggaaggcaactcctaagaattctctcgccaacatgaggagaaggtcctgtgtagaaagcacagtagtcaaggttcgttacatcaggttgaaagtgaaatgcttatattgaaaataaaaccgactgggaaaggccaagttttttaactttggttgactcaaggtgtggacctggcactttatttggcctgggtttatgcaatttttagtcaactcctcagctgaaggaatacagtgagttcctatggctgggcacaaacacttgttcttccctttcaagccccttcacttgattctctttccgtgttttcccagctttgccagcagcaatggaatagtgaatttgctcaagttgattgcttttccttttggatgggggagtttttgatcttgggatcttcatcgtgaaccagacctcaaagtctaaatagcagctgtctatgccctggtgtgagggataaaagctggtgcttggagcaaaggcttttcttttattctgtcaacactcagctctccattgctctggacggggactgtgtctggtgccaccgacttacctagaggatggttaggtggacaggactgagcaggctgggaggagaggcaggcgtgtgtacgtgtgcgggcacacacatcacagacatcgcagggagcggtttccttttcataactcttcaaacttgatttgtgtgtgtgtctaaacagatgcctgaaagaagacatctgtgtggcagacactgtgcttgcaggcttctcaagggcatgacagggtgctcgattcttgaccagccatgtgactttgagtgaatcatttaagcacatggaacttcatttcttaagtgcaaagtgaaggccaatggtatcctaggtaatgttaatatatttaaaagggcccagcacatagtgaacacgtaataaactcccaattccatcttaattccttcaaccttaatttttattcaaatgctctggattacctaacacagatgccctttaggcagctgattgtaaggacagtcactgcaatttgtgctgggttgaattgatgccgcttctaaggcattcaaggtcatcttcttaggaagtctaagagacaaatctcagacagtgttcattcttttccagatggaaaatggaaaaatgtggtcaagcatccaaatgtttggtctataaaacactgaaaacattcagacatttggtattgggagaataaggtgccatctaagcatgtgagtgtcataaagtcaactggccctgccattgggatctttggccttaatccagttgcctaggagaaataaccctggctttgtggtttaactcattttttttcctcttctttaggaaaatttgaatttttatcctcactccagaaggttaaaaagaagatttctctgaaattagttgatttgcaggggctggctaagattcttataaattataaaaaagatgactttataaggattcagatttggatgttggctccttatttcaaccaaacttgttccaaaggaaattctgaatttaccttaaagaaaaaagaaaataaattatttgttttcaagattagtttttttaaagccaggtcttatttagttctttcacctacatgttaacccaaaaaacatttttcatattccttagaatatgggtttattttcaatgctgtttgcaaatggatgccataatgttaaatatttcccttaaaaaagtgaaagtcttgccaccaatgtttcctgcacccatggaggaagaaagggtgttgggcatatgagatccatgtgtctagggtagatttgcttacatcaatggcctcagttgactcctggctcagccatgtggcttgatttggcagtgggatgttagcacatgtgatgtgtgacatataagtttgaacaatgcttctatgttggggcttgttctcctactgctcttgtaataacctggagaacatgcttgagctagcttgtttggattgttacacatgaaacagagtcccattttccctgatcccagccaaggccatcatgaaccagctgacagacctgagcgccccactgagaatagccccaaacctatggctaaccaactgcatggggaggactgaccaaaaccagcagaaggcccaggtgatccacaaactcaggagcaatgagaaatagctgttgtcagctcctgacttttagggagttttgttacagagcatgattgtggtcattggcaactgatacattgctgtgtacactgccctgcgctctgaaatcaaatggacctgcttcaccctagcttcgtaacatactacaaggagcatgccgcctaatctctttgattgccactttccccacctgaattatgaagaaaacagttcctataaggcaggatggttgagcaagtagatattaattatcactggacaattaataaatagcccccttaataaggaggctgctattgccctgccttcttctttatgggtagcaaatggagagagtgaggcagctgatgtcttgttgcaccagcatggattttatagacccttttgttcaaagtccttgggtttcagagactcactcagagggaaagtcctgggatatcgtgcttggaaaacagtatgaattttactgccaagaaataacctttgaatctgaattttggccttagttttcattttttatattgaagtgaggatcaagtagagaccaaagaaacctagagacatttccagactgagttaatctctttaatcctgaacttttggatacccaggcaggaccagttcattgtctcttaagcaaagacatgtgagttggatatagagaataacagagtttcagaagataaattccactgcctcaataggttttttgaaatagatacgaggaattgatcatctggggcgcaatgcttggttgatggaattgcggaactgtccttttgggttgggtctgtgtttgcattccaggctaagagttaagagagctgatcatgagaaatacagttatgtttctactacatcccaccatgtttccatgctatggggcctcttcattccaaaagtcttgttcaacagaagtctcaactcttcaacttcccacagaattcaatcagtgtcagagcatggctgaacacagacgcttattgaatggctgttggatgaataaatgagggtataaatgaatgaattcatccttgccatgaaatggtagtctttgtaaacagaggagaccattgattaagcatggtaagactcttaggatgtgcacacagaaaggcactttaggaagcactttgttcaattctctcatcgaggaggaaaaagtcttggacagatgaaagagcttgtcctgggtcacccaggcgataatgtgcagacttagagaggggcccagggcaggaatccagctctcccatctgctatgccaggatttctcctgctctggcctgctggttcctcacccaagattcccttcttatatgccaagttacaatgtatagcccaggtggtgggaggggctggtcccacatgcctagcattttaactttaatgtgtgtactgttacctttgggaagttctttaaattatcagaattttcctaaagtcctgcattttacctatatacgtacacacaagtgtgtgtatagtatatacatatatattatgtgtgtacatgaataagtatataatatatacatatattatatattgtatacatataagtatataatatatacatatattatatattgtatacatataagtatataatatatacatatattatatattgtatacatataaatatataatatatacatatattagatatacatatatgtatatattatatataatatatgtaacatatacatacgtgcacatatgctatatatgtatatactatatatgctgtacacatatatgtatatattatttataatttatatatgtatatatttatataatatccaatcattgtacaaaataactttctgcagccattaagctataaccatcacactggggcttcatcgtttccatagcaactaatgtactgcaaagtgaggagcccagagaggaacttggtagaggattaaaaactataccaaatggggatggttgatggctacagaaaaatagaatataatacctagtatttgctagcacaacagggtgactacagccaaaaataatttaatcatacatttaaaaataattaatataattggattgtttgtaatacaaagtataaatgcttgaggtgatggataaaaacaaaaaaaatgacccaccctgacaaaactacaccatatatgagcatcagtaaaacgtgccattggatggggtgaaggagtggctcataaacttttaaattgatgcctgcttaggaaatctctgcctatctgactcaaggctttgctatttataagcagtcaaaattctagcattcctaggcattgcgtcctctctactgatggtgcagaggtgttgagaagctgtttgctgtctgttcctcacagaggcattgaactgaaatattgaggtttccaattttttatatgtgtggagacttcaaggactacaggaggttccaactttctaccactggcacttacttgctaaatcagccttgcaaattagcacctgcccacatgcctggtgcttgttagaaagctggccagactagcagataaatgagctagtgaaccactaagggctttaaggagctgggcttctggcccaatcacaacttctttcttcttttccctgctttgttttgattattttattctttgatcgcctttctttttcacttttgtttcccccttcccctgttttttctttgctgtgcatgcttctagtactcatcttcctacaaccccttacttttgtctgggttgcccatatggttattctccctggtattttattgttgcagcacttgctttctccttcctcccacatcatggactcctgaaggacagaagctctgcttcctcccagctcctaggactgggaataaggtgtgcctaattaatgagcctaggtcagtggtctttctattttaacatgcactggaatctcgtgggttgctgggctccacccccaggaacttctgatttggtaagtctaggcagagatgaggactgagaatttgaatttctaatcggtttccaggtgatgctgatgctgttggccagaggtcacactttaagaaccaggatcctaagtcaagcatgaacccttgatcaaatgacatcttgtggtttattcctctagcgtttcttgctctctttctttttttttctttagtagaattggcatcttgctgcacacacagttttgtattctgttggtttaacctctcatacccatgggaatatttccctgtggtgaatattctctaagtccaggtgcagaccagctctgaaaagctaaatctcacttgagggcagtgttaatggaaaaaaagggttttgctttctctgaacaaagtggaagaatttatggtaagtgggaccaagagttccagctgaaaaagccacgcttgtcttacgctggtgacactcagctgagctcagggcaaggcacagcccctcttgatggctggaatgtgctccagctgaatgccttgctgcggggatgagcttagctacctgtgaggacagccagagccaaagatgcagccagcagacgcccatcaagggagcgctttctgcagttagggtgggcagggtcagcctggatcctccaacccctgttcttggagcctggaggagctggagggtagcctcccatgccgaagttcaggcagaagcacagatatgtggatgtgaatataaggaactcctccttggatttcaaagtacatccacaggggatgggtgtttctgcatgaagaaagtcctggaagagtctcacctccattttctgtgtggtttttgataataagcatatgatttttaaggagatgtcctgcctttgaaagacagcctcatggcatccccaacgacacggatgggtccaaaagtgctcatgtctgatttcagccactccgagggggacagtccatccaagcagcaggagtgtaagtgcaacccagacgtgtgtgcatgcgtgcctgcacatatgtgtggggagttaatgccctggggcaactctctttcaaggaggtccagagctagtgataaatacccagctgcctttccttcaggcagatacttctgggggtactgtgtacatttcccagtggagctgaacccctgttgctcagcagagacctcagtaatgcaccctttcaggggagtgtctcttctcccctgtctcagattttttgcaatcactctcctaaagaaattacctgtatccaagtccttatctgaaaagtccttagttttgggagagtccaaactgagaggggtgacatgatttgcttggtctcttctgggtgaccataggatggcaaaccgccatgaccctccattctatggggccatcagcagatctccagacatatccctgaaccgcacaaaatgtactgattgagagaagagggcaccaaatgttaggacaatggtttgaactgggttttatgggaacctagaggtccatacaagggttgaagggctgctgtagggttggggaggagagtggacaacgaagaccccggcatcaaccacagcagctctttgttatctatttgtgctgtgggattactaagaaagaagcttaaaaaaacacatgattttgctgctaagaaatgtcccagagcccctgggttagggcctaatgcatgtcctaacaggagtgaacacttttcaacaaaggttgtaagcaacactctcttctcccatgtatctgttctgtgtttgtgcctttcttggcaggaggaggtgggctgcaccatcctgggggcacagatgggaagttgaggcccttaacttcaggatgttctcccattccctctgacggagctggagagaaggctctggtccccacaatggtcatactccatgcccgccgtccctgttgggtgaggccaagagtgaatcacctgatgctctctgtagcattcttgttcatctgaaaccaggttagaactcccatcaggggcaataaagaagggggatagaagtcacaaaaatgcaccatgctgtctaaattaggatttaggaaaagtctgaatccataaggcagaaaagggttgatactttgccatggtggattgttgttgttgctgttgttgcttattttgaaatgcccatagtaggcctaaaaatatacacatgggctgttacatagacaatgtgaatggatttgaaaatcactggccagtgacctctttgtgagttaggtttaaaagcaccacctttctaggcccaaagttcctccagggtggtggctctgagttgagtggggaggtattgagctggatgcctggactctgttcctgcagagcctaatcagtatgtctgcggtgagtcttggcatctggatgcctttttcatgctccttaggttattctgacatgcaaccagacttgggaatcatcaccaggttagggtgtgttggtcttgtttgtaggtcattcacagcaagagcccctgtggccagttctgacatcttgaaagctgtgggacaaccagctgtggtgcccctgaaactcctggggctaggagacacagcaacccttgtactagcaatgcagggaaaagggcagtgttctctgataggaacttccagagatggggacagaagagctggttaaagggcagattggattaaatagctgccagggacctagcctgcagttctttcatgccaatttgaaatgtcccaagttttcaagtttctcaggggattaatcaaggcaacccactctcctttattctagaaagccgtgtatcatggacatgagtacactagtcctgttttattctgaagaaagtagaaatgtagactgaagaaggctttgctcccagggtattgggaattgggaagggagaattggaaagggagagtgaaaggaaggagaaagctgtgatgagaagaaagagggatgtggaagaatgaaaaggagagagaaatggaaaagacagaaagggaagtggcataaggactggaaaagtgagaggcaaagggcacctgtggcttgctcaagacttcatatccaggtgggatagtttcctccaacccgtggggtagacacagctccaacggtgccactgatgagctggactgttgtggaaactgccttgaaccttgtctgcgacatacaatacctagacgtcaggaggcaaaatgggaggagaggtgtggggcaccctgcgtgtcagggaaagggctgaagtaaaaccatggtaaagccagagtcagactcactgctggtgccttgatgaacgcaggggatggcaactctatgtagacaaagtgcatccacagctaacctctcatcttttggattcagtggtttgcatctccttttgggaatctgcctgtctcttggcatttggttgatttcaggttaaaatatgttttgcttgggattagccttagtgtccagattcatctttttcagcactgccttgcttctgaccttgactcttttcacgttccccctacccagctgtggcatccctctggtctacctggatcaccaagggctctggttcatcactgttctgcgttcgttcttttattcattcattcattgaatacctatatattaagtatctgcacaaccctgttgagccagacactgtggtactactgaggatgcattgctgctcttttggggcttatgctctgatacatcagttcttaaccctatctgcacattacagtcccttcaaagtccccctgcccaggccttgtctctgacttattgcatcaagatctctaagctggggatccagcagattctgaggctcctctaggctttattttttctttatttttaaattttttaaaaactagttttctcaggttaaatcctccaggctctagaccactgagaaagaatactctctaagcactggtattatttgggttctagaactgcaccctagcccctcgatgaggggcatgaaaagcatctgactttccgtctttgctatgggtagcatttcctccctggctctcttgctgctggacagctccttcctccatagccctagacccactgctcatgccagccgtggctttaacttctgcaccaccagtaacaccatttcctctttgtccttccagccctgcaggtggagtggcctccagctgtcactaatctttatgtggcttctccgcggttccatcacctgtgtaaccaatcctctttcatgattccctctgtttgaaatgtctggggtgaattctgttttcctgacgtgatcctaactgatataacatgaaacataatgaaaggcctctgtaaagcggcacttccccatctcttgtgagatggtgcctatggtgtacagggaggcagagaccaaggttgctgggaaaaggatgttcacttcctgcatctgaagcatctggaacagaaattttcatagatgggccatggcctgcctgcatccaactcacctgggaagcaattcctggctgtcaccacaaaacggctgaatcaaattctctggctggggtcagaaactgtcaatttaaagaagttcctcctgagttgatatgtctcctaatacatgcagccaggcttccatagaaagctgccggtaacaggacacatagttcttgccaggcacacttcttacaggttcagtttcagttccgactctaacttgtgatctcttgcagaaggggaatgtccttccctatacagggcagtcatttgggggatgactgatctatggttggaaaagcacaaacttacatgcagctctctcaaaaatcacagtagttttggaatcaggggagtggcttgtgtataaagcagtgtgacctgccagagagcaaagggcatgagtctttgaccctttcaggcctgcattcagatctaagctcagaaaaccctggctggatccttaacctctagaaatcctcagttcgttgacagcagcacctccttgtacagtgggggtgaagcataaatgaaataacagctcttacaacccaagcacctcttaggcattcaccagtgattggttcccctcccctctttctcccttcctcccccaagttgaaagatgagtccagcaaaggagactgaacgtcaagaactatttgggtttccactcggcttggtcattccttcctctttcctgtcacggtaaaccatggatcctgttgcttgctttgggtatttcctttctgtaagctccagtgacacataatatttatcattattttttctccttatgtatttactgctttttaagctaatctcttttgagggtggggacagcattacctcatagtttctaagcatctttctgggcacgttataggtgttcaataaatataatttatttcaattattcttccagtgataactacaacctctcaaacaggattgaatatgcaaggtatatgcccctagaaatggaataagttctctcagatcctatgcttgcaaatggaatagctgtcgttagatgacggtgtggtactgcggaatgccattgaacttgtttggctcctcatcaggcatagggactgatacaatactatccacttgacctgctacagaggaaaaagaccctttaccaaaactaccttgtaaagcatttagctaatcatcgattatctgcatattctctgatttctctggccagtctttttcccgcccactgcttgttgttttaaatgacatcattgcacccctttcttcgtttacattctactcgcatattcaaatagctcttcctagtccatgactcttactttcttattagaatgctcacctgagcgcacttaccttttagggttggaggctttcccctctccttttagtttcatgaatcatttgctaagattctgcttgctgtggaataaatgcttaattaatcaatacagtagcagtctttcattttttttccccaagaaaactgcagaatttgctggtcggaaagctacagccattctccactgggaggctgtttacctttcttaacattggaactgagcaaaatggagctagagagagaattttaacatgagtgtgacattggtttcctcactgttctctcaggacagctttgtgtgggttcatgagacacaactgtaattattttctagagcatgatataagattaggattaccaggaaaacctctctgcccttccaagtacagctttccaagttttgggggtgagaaggtgtgtgtaacataagtgtgtgtgaggggagggtaaaatgtaagagcagaagtctatgtttgcccacaggggcatctggggtctttttctcacccagccatccttagagttctgaagtctgagcccgtctacacttgcttcttccttgggacattatctccaagcagagaaacagaatctgctcgccatgtgtgaaagcacaaacatcttttgagtggtgccaagcagaaaggcctggctctgaaatccttcctgctgaaaggagggagggccagtgaaaactattaatggggataacaatatctgatgccatttggtgactggcctaggggttttatatgcattatacccaagcctcccttaccgtcctatcctgcttacctattgctgtgtaacaaaccttgccaagacttagtggctaaaaacgattattgccttatatctcatgatttgtgggtcagaaattcagaccaagctcagctggtgattcttttacatcacacctgtcactctgtgtcatttggtcccactcagctggtggatggactcctgtggatgacccacatggctttgtctcatgcttggtcccttggcagggatggctggaaggctgggcacagctggacagtcacccagagaacctacacacggcctcttcaacaggtggcctcggggaagtcagactttttcctcaggggctctggactcccagaaagaatgttccaagagctgcagaagaaaactgcgagtcctctggcattgtcctgaaattctcacaacatctctctggcatattctcttggtcaagcaagtcacaaaaggaagccttgataccgggatgggaattaggtcccacctcccaacagaaggagtaaaatgagaaggaaataatatgtggccaccatcctctacctcatctgctttacattctctttcctgtaccatgtatcacccaacttactgtaaatttacttatttattagggttactgcttattgttaatctgtccatacttgaatataagctacatgagggcaaggatcagtgtccgtattattcactaatgtatcttaaacacctagaaatagcgtctggcagtgtggcgattcctcaaagatctagaagcagaaataccatttgtcccagcaatcccattactgggtatatacccaaaggaatataaatcattctattataaagatacatgcaagtgtatggtcactgcagcactattcacaatagcaaagacgtggagtcaacccaaatgcacttaatgacagactggataaagaaaatgtggtacacatataccatggaacactatgcagccataaaaaggaatgagatcatgtcctttgcaggtacataggtggagctggaagccattaccctcagcaaactaattcaggaacagaaaaccaagcatctcatgttctcacttataagtgagagctgaatgaggagaacacatggacatatggggaaacagcacacattgggacctgtcgtgggggtcccacgataagaaactgaggcacagagaggttaaatcacttgttcaaagtcacatagctagtgagtggcagagccagaatgtgagctcaggtctctctgatgtggttttgtaggtcagaacctaatggtaaattcggcagaggagagaacaagcaaaaaatggtaactgtggcctcttcttggccctggatccatggttctcccttgaaatgacttatctcacacactggctttgccttttttttttttttttttcccagaaagacatgtggggagaaagcaaatgtgggactgctggattgctgtggaagatcgagtgggggtgagcttgttgcttctctctcagtgctgctggcaccaatagacaatataggactcttggaagtaaaaaagttcttcgtttgattgtgaaatcaagccaggccaaatggggatcagcagcaaatcagctttctgcattcctgttgagtaattctatgtgctggcctcctggctatatttagaagcaattcatggtctctatctttgctaaggagatggtacaacccaggggacgatgtctctgaagccaccccatgcaggcagagcttgacgtctgcagtcatacctttcctgtcgccccgccccctcttctcccattgcaaatgtcaagcttcccagcatctccgaggagaagttaacctccctggacacttattttgttgcctctagagttacttcagtgaaatgacctcatattaccttgagatcttttccctctaaatatgagtatttgggtgcacgtgatttccttcaggagggagggtcagcatcctggcagttgaagttctctgcagtttgtcatctgttctccttctctctagctctgggagacccctccctcactggattctttactacaatgctgcagccttctgtgtggtctgactttgaagtgctgttgccagttggtgatactggaaccttgggggaacaggcttggcaaaacagagctgggtgattccaggtggatgatggaaaccatggcctagtggggttgtgttgtagctgggttagcaaagacaattcgtggaaggtagcagaaagatattttaagatggagggtgggatccagaaaaccaatgattggaggcacaattaggttaggaactagaagcagctaaccataggatcagggattagaacagatctgaggtcccaggacaaggctagttcattcatggactcattctcccagcaatatttactgagtgtgtaacatgtgtcccacattgtgctagctctgagaatacagggatgagccaaacagtcatgctcttcccctcgtggtaaaatctagcagcagaggctgcggggaaacaggctgatggatacatgtacaattgcacatgcgatgtgcatgagagagagatggaaggggcatctcaggggaggccttctgtcctggggagaactaagaggggtgggagaacagtgttcttacaaaggaaaaggcacttgaggtggctgtgatggtgataagagtttggcatgtttaagaaattgagccaaggcttcagggagaggcagatattataggcaagagtgggggctcctggcagagtggcaccttagtcaggttttaaggggccagtagttcataacccaataacttcttaaatatgtcgtgcagtttctgactatctatggagaaaacacttctgtgctcacccttccatacttctggaagcctcttccaggaagtccctctggatttccctgctaaaatgagccactacagaattcttcactgaatgctgcacactcatagcaccagtaacccgttctatccttaaagaaagggctgagtgtttcttcatctttgcatccccaaagcacagaatagggccaggcacatcatatatgtgcagtaaataattatgaatgaagggtgtttcaaggattatggctgcattataaagcttagcagcctaagacaaccattttatcatgctcacagatcccggagctcaggaattcagacagtgtctagcaagagtgttatgtgtctgctttgtgatattcagggccttggctgaaaagaagaatccatgtctaggtaaggctcggtggctgggaactggaattatctggagggtcttccctcacccatgtggctgttgatgctggctgtgggctgggaccttagctagggctgtgtgttagtccattttcatgctgctgataaagacatacccaagactgggtaattcataaggaaaaagcggtttaatggactcacggttccacgtggctggggaggcatcacaatcatggtggaaggtcaaaggcacatcttgcacagtggcagacaagacagaatgcgagccaagtgaaaggggaagccccttacaaaatcatcagatctcatgagacttattcactatcagaagaacagtatgagggcaatctcccctaagattcaattatctcccaccagatccctcccacaacatgtgagaattatgggagctacaattcaagatgagatttgggtggggcacagccaagccataacaggctgtcaactagaacatctacacatggcctccccatgaggtctgtgcttcctcacaatatgaaggtcttggggtagttgggctccttaggcaacagctcagggcctcaaagtcaagggcccctacagcacctgataatggaagctgcatgggctttttggaccctatcttagatgtcagctgatgtcaccagtaccatgttctcctggctataagtgagtcacaagcccacccagatgtagactccacctcttcatggaggggtggggtttccactgtgctagcatccctggcaggtaaattggagtacattaattcaggtgtatctaaactgtgttctgtggagtgctgttaggacccttcctggaggagcatgcgaggctcatcaggccaggaggaggaaaggaagcccaggtgtccccacgaaggacttgcaggccctagaggacagggtgcttttcaggctctgtctgccttcaagcaagggaagaggcctggtgtggggtccagcagaggaacagaaagcctttcagagtgacgagattgcacaatggggacggggaaggacagtgctgagacatcagctgcatatcctgctgcgacctcaggggtgggggctggaggcagatgcctgtgtgcctgctacatggctccgctggggaggggcaggtgagggctctgtgctcagtcctggcagccactcacatcatagccttggacaaacgcagtgacctcgttgtgtctgagtccatcagagagaggcagcattgagaagatgagctgggaagggctgggactgctaatcctggcttcccgggctccatatcggccccaacactcagtcagagctccaggggtggaggttggtctgagtgcagagacaagcctttcctgggatgaggctgcatttatggatttatggggctggacctgcaattgagctcagagcctggagcttggctgcatttctttgctgtcatcatggttcctgccagcccactttttaaaaattagaacaaaattcacgtaacaaaattcaccgttaaccatcactgtcatctaatcctagaacattttcctcactccataaaggaatgctgtcctcattaacactcactccccacacctcctggccctcagccctggccacctgctggctctttgggcctgcctattctgagcatttcctgtaagtggaatcgcacatgtgtcagccacatttttgctcctgatgtgggtgtgacaaccatctcagggcaggggtaatctggcctcacgtccccttgctgtatccgtgtccctctgagagatgggacagtccttgaccaatgggggacagagctggggaggatggcactcccctcctctccatctcaggtggccaattcacaggcgcaatgtgcacaggttctccaaggagcccatcgggaaggagctctgctggctcgcggcgtgaccagttcaataaagcctctttaggttgactttgttccctctcatccctgccaatcctgttccatgagatcaccagcactgcctccccaaaccacagcatgaaaagtagcaaaaattacttcttgtacgcaagtcctatctcagattctgctttttattggggatggggcaaattacaccagtgtccaagagaggaaaacacccagaaaaggactttgcagcctttgtaagtggctgttcaggtccctattgatgtggaaggggcccggcagtcagagtctgatttgcacccagctgtgtctctcaggtgattttccccagcacttagctcctctatgcctcagtttacctgtctgtaaaacggggataatgacctgttctaccctacaaggatgctgggaaggttaaatgagatcttgtatgacaagtgctgtgcacgggtcctgggaggcagcaaatgctatcgtgattactgggcccctttagctcaaaaattctgagtgcaagggatctccagcctagtcttacttcagcactcccaggacccaacactccagacctgtaccgtccagtcaggagctactggccatgtgtggccctttaaatgttgattgcttgaaattaaataaagtaacaaattcagttcctgggtagcagtggcacatttcaagcgctcaatgggcccataaggttggcggctccctcactgcacgacacaggtgtcgagcatttccatcatcaaagcaagttctttcaaacaatgctgctcccactgcttggagctgttcattcttcaagaaatatatattttcttttcattcctccatgaccttgttcatggtcttcctttcacctgagtggcccgtccactcccaaaatctcaccagccatctggaaagggtggcgccccctgggccctgaccagcatgggccctgcccctcctgtcccacagccctgccccatcgggtggctggctgcagcctctgttccacaccgtgcgactagcagcaggaacatgacacttcttcccacatcacactggccaaagcaaagcatggtggtggggtggtggaggaggaggagttcattctgtctttagcgggagggactgcaaagttgcaagagtaagggcatgggttcacggaggggtgaaacattggagcccataactgaatccaccgctgatgaggaagtttaggattctactctcagcccccttccccctcctctcctagaggctcagctgttggtcctctggcgtcccggaggctccccatctgcacctgaagcttctcccgcttggacagcatcctatgttcataatgggctcttcctccctgtccccaacaccatgctgcctgagaatatcaccattccatctcagcttcaaggaaggggctgccttaaagtacgagtctctgagaattaactctgtgaatccatccgagatatttgcaggctaaaccagaaccctgtttacgcagatcagggagtctttaatgatggtattttaggcagcatgatagctcttttgggcctccatctatcctatctgtgtattgataaacaggagctggggctaagaatgattcctacgtgagtcctgcacgtgatgtgtgtggctggaaggagccctgttaggggtgtagtgtaggaaccaggagacttggggtggggacctgctcctcataggtcacctttagacaatttcttcccatctctgggcctcagttttctcgtgtgctaaacaggtgcagagtaggtggttaggttgatagttcccatgcttctgatggctttgagatgctgtggtcccgagtcctcactctgtccttgaatgaggccagcagttgatcttggtgggatgtgtcctgctttctagtccttgtctcttcaaacttttccaacctctgacccttattctctgccaaagaaactgactcccagactcccacaaagggggagtctactttttagggtctgctttttccagaagatctattcgtagagagctcaatgtggactgggccatgcctggacattatagccccacctgtaatcctgctcacctttgctggggtgggagaaggtctttctagaacatcaatgccatgttacaaactcaagtcaaaataaatcaaattctaagggcaaattcgggataaccctaaagctacggggctttgataatgaagcaggccctgatactggctcccagggcttatccccacctctgctacacccacatgagcatcagaacaatgtggcctttaattttttacagacaaaccctagggttttcttcccaaggaatcacatcgactagcatttatccagaataatttgctgttggtttagaagttcatatgtggggacaagaatgtttctgaaaaaggcccagaaatggctggagaaaataatctgtttgtttgctcccctgcaacaatagaagcaagtgtaatgattcatggctcctgagggaagacagctctgcttcctgcaggattctccctgggcagcacctctccaaaagcatttgccagggtcaaggtgtctataaaagattgggaactagatggaagaagtgttgcagagggaatttgggagaaaaggtcttggaggtgccgcaggctgcaggtgcactggccaggaaggtagacaccaggggtgcggtgatggatttcagacacagaccgctgcgggggagggagggaagaatgcctgccctaatggacccactagagctagggctctcgcaaatcagccagcctgtcatctgctactcacatcccccacttgcatgttatagcctgtgcctaaaacatttgttctgtgtcaggtactgtctgggaatctaggtatcttaaataaatatgacccttgaggccactaaggtcattgtgagagttaattctatatgatacaatgaatgtaatggttatactaacagagattttccaacatgctgatgcatgttcttttttcctcactgttaccttaaaagataagccttattctaattttatagagaaggaaacagttttggagaaattaaataatttgctttaggttatagctcagtcaagaggggttctggcagaataatctatgagaccagcacagtccaatagaaataaattgaaccatatgagaaattgtaaattttctagtagctacattaaaaactgaaaaaaaaagtgaaattaatttcaataacgtattttatttaacccactatatcaaaaatattatcactgaaatgtgtaaatcaatatatatattattagtgagttattttgcattcttttttatgtaacgttgaaatttggtgcattttacattcagcacatctcaactgggattagtccatttcaagtgtgcagctgtcccgcacttgaagtgtggcatccatattggatggcaagcactgggattttatggaagccggaagggggcatgcagccaagtccatgtgtcaggggacatcaagggcaaggtgccacctgagctggacctaggaacacaaatgccacaccaccaggtgcaaacaccagggggcacccatctctatccagtagtgccaggggcagccctaggggttagccaggcagaggagggaggtgagctagtgcaggaagacagactccttcagcactatcacctgttgagagaactgcaagcatttgccatgaggatgacgtggtgaggttagacagaggaggggagagcaaggttatggcaggcctcccgtgccacctaagggggctgagtttcattctgctgctgatgctgcgttgtgacatcatcatagggtgctcttcagcagaggacttagagcagggagacaggaaagaaattctcaggagctggagagaaatgtttagggactggcctgggacaggggatggaagtggatagagagagagtgagtctactagctccccacttgcaaggtttgtgatttttctgcagaaatcctcagctactctaggtcagaggtagattgtcagaaatttggagcacaacaacctgtttcacaaacagagagatattgatttaagagcaagaggcagctaggatcaccttcattctccctgtggcctgtgctatctccaaaccaccctatccttaatctccccaggcaggcccagcacaaaccatctgcctccctctgtcccctgatctcctcatagttctcatagttctaagcagtgtgagtgtttccttccatttttatttctcctgatagctctgtcatattggaaatacctgtctgcaggatcaaccgagctgagagatcacccagaggcctcttttccagaatgcctggtgaaagagaaggcaattcacagagcacaagctacagctctgacactggcccttcctgctgaaatcgccatcatttaacgacagttgtggttctgccgacacaatgtactgccctggctgtgcaggggtctggacatctgcaagtctcaccaactcccaggggtgcctttactgccagtctgtgagccacactttaagtagtgattggcctgagtggggctgggagtgggggtgtttcagtcttagctgctcactacagaagctcttggagagactataatttctcatacctgggctgcactctagacctgtgaaagcacaacctctgggtgtgggagctgaggaccagtccaaccaccatggacagaaaggccctggaggaggggatgctgtgtggaaagagaggccacagggaggtgacctggggcccagacataagccaccaccccagctgagggctcgcacacatgagtgagaccatcttggccctgcagtccctggccagctgccccagccaacactctggagcagaggtgagctgtccctgccccgcactgcctgaatccctgaccgacagcagccatgaattgtaatgtttaggccaaatgattgttgttcgtaaatcaggaagcttggggagatttcttatgcagcaatagctagctgatacaactcacaggactttaactgccttgagagtaggacctgtgttggtgcccctttgcaacccctacacttcagtggaaatttggagaaggctggagaaatgctaaatgccagggaaaggccaaaggaaaaagtgcagtgctgtccaggccaatggaaggcaggaagtggagagtcattgttcggaaatatgttcagcaaagaccaaaggaaaatggacagggctcctctccttacccagatgagcatctggccttgtgttggcctcgctgaccctgcctgctgtttctcctgtccactttctgctctccccatggctccagcttccaggcacagcccaaatacttggagcagtggacagtgggtggcaaatggcttcaggccactctcagcaaggcactgggggcacagcctgacttcccatggccttctttatggtgattcgggttcctgtggttctgtgactcacctgtcattgccaaagatgccaggatggggcctggaacttcaaggcagcctgggaagggagctggcaggacagatcaggaaagaggagtatcctggggtcctagccagattttgcagtcacaggggcctttgggggcagcagctcccggccagtcaggcctgacccttttttgggacatgggtacagtttgggggtgcggggcttggagctggagagaggtgtggccgtgtctgctttagttcctctcgcaggatcctgtcagagctcctctctcaagccccagcacctgctgtggcctccagaaccatctctccttagccacagaggaagggtgccctggggctgggcttcaggtagggaggggtgagcctgccttcatgcgtgtggtcgccatcctgtggtttccttcatacttttccagggggctcacgccccatttcagggcacagacccagagagaatgacagccattccctgtgcttggctcatgctgggccgtgggctgctttcggggtgcatgtgtgaagatgtctaggggacgcagagctacatggtggggcccctcaaagtggcccatggcctggcgctggttcatgagctccttgttaccagttggtgacaggatgagcatttagaaacattcgtggagcttcaacagagctgcaacacccacacctatgatactgtatttttttttctttgagacagagttttgctcttattgccctggctggagtgcaatggcgcaatctcagctcactgcaacctccacttcccaggttcaagcaattctcctgcctcaacctcctgagtagctgggattacaggtgcccgccaccacgcctggctaatttttagtatttttttttcttttttttttagtagagacagggtttcaccatgttggccaggctggtcttgaactgctgaccgcaggtgatccacccgcctcggcctcccaaagtgttaggattacaggcgtgagccatcgcccccagccgatcctgtattttacagaagaattagtccacaatgggttggaacaaaaataaaatgggtccatcactacagagagggaacactgagctagaaaccacctgctttgtatggacgcagcaaaataaccactcccaggaagcccccaccagctgcagctgcatgcccctaattttatactaaacagggcagcaaggaaggaattaaagttccctaatattccagccaggtccagtgcacggccagctcttccttctcagagcttctgctactccagtggttttcaccgtgtcatccttggaccagcaatatcagccagatgtgggagtgtgttcgaaatgcacattctcaggtccctcccagacccatggacgcaggcactctggggatggcaccagccacctgtgccttaacaagcccccagggaattctgatgcttatttacttatgcttgagaactctgtgctcttgtctctaaaacatcgttatagatgattttattctctgcttctgttaaactggtcactcttttctctacaactactttctgagctcattgaataaagggactcagaattctacatctgcatcttccacaaatcctcgcccaggctgagacaggggctgaataaaccaactactgatatatcccacctcttgaagtttcatcacaattactgtacccattatagagctgggcaaaccagtgagcagaaggaacaccataaaactgattttggggccagacaatggaagaattgggttgaaaattttcttcccattcttttctccttggcatcaagcagagaattcattctctcccgagtttcctcttcactaatcccactaccccccatcccttcccaaacttggagcttgctgctcttggccttttgtagggcctgcctggtcttttgagtttaaaaataaaaatttaaagaattaccaaaaggacgttctgagctctgtctggcaatttgggcagagaagcctgacatctgtggccatcactgcccactgcagacaaaacggagtcagccctgagacactcctctcatgaaaagacaccccaggcacctgttccagaaagacccactcgaggctgggagcggtggctcacgcctgtaatcccagcactttgggaggctgaggcaggcagatcatgaggtcaggagatcgagaccatcctggctaacatggtgaaaccccgtctctactgaaaatacaaaaaattagccaggcgtggtggtgggcgcctgtggtcccagctacttgggaggctgaggcaggagaatggcactaacccaggaggcagagcttgcagtgagccgagatcgcaccactgcactccagcctgggcgacagagcgaaactctgtctcaaaaaaaaaaaaaaaaaaaaaaaagtgaggtctggctgggtgcagtagctcacaccagcactcagggaggccgtagcaggaggattgcttgaggtcaggcgtttgaaaccagcctggtcaacgtagcaaaactccatctctacaaaataataataaaaaacaattaatggggcgtgatggcacacgctatagtcccagctacttgggaggctgaggcagagagttgcttgagcccaggagtttgacactgcagtgagctgtactttcccactgcactccaggttgggtgacagagtgagaccctgtctcaaaaaaataaataaataagtaaaataaaaaacaaaagtgagtgcttgcactgccaactaggcatgcatgtgtgccaccaccgaaatacggatggcacaagggaaatttgttctggcctcagttccctggatgttgctgctccagcagcccctgttggtgccacaggcatgctctgatggcagctgcttgaactgatgaatgttttgctgagaaatcagatagacatgagtaaaccaatccaaggactgtagctctctcacagttttgcaagctcagcaaagataagcgaaattgctttgtgtgcagaatgtcattccctctctggaaggaagatctcggtatctttccatcaggagaatctggtctccaagttaacagcacacgctacgcagaggtgaaggctgtgggagggaggtcagtggagagaatattgaagatgggcacgccctggttctaattggagtcacctggggagcttcaaagccctcccacttgggccccacccccacagcttctgatgtagtcagacgcagaagagattttaaagcaacctgggtaattctaatgtgttggccatgttcaagatcgctgggccaggttctggttaggacaggttataactccatccaggtttgatggtctcaggtttgagggttcagccagatgattagagggggagaggacctcttggaatcctagtcttggcaaattgggagtttccttgggagttctgaagatacagatttagatacacacacccagctctccaggcgatttgtgtataaataagagcacctcagctttccagcgttatctggatttggggaactgactagatagccctggggacacccttgggcttttcctccaccccctactcaggtgctggcagatctcacctacctcgcccatcattgcttctcagactttaaagtgcacaataattgcccagggatgttgttcaagtgcagattcggacttgctagctctggagtggagcctgaaattctgcactgctcacaagctcctagtgatgctgttggtccccaggcccattttaagcagtgaggagcccaaatgtggtccatgtgagcagcccaccagcatcaggctcttcccaaaagccttttgcagctgagtggcccccttctagctgggattccagtggctcctggaggcattagaggcacccgttatcccacttcccagttgtccctgatggtacgctgcctggagctgttcctggttttctccctgtggtatcctgactccctggagcaatggcttgcaaacttgggttcaccttagaatcacctgaggagccttacaaaatgctaatgcctgggccccaaccccattgagtcagatttgtctgtggtgtcatctgggtattgtgattgttagagattcccaggtgattctagtacagctggcctcaagccaggagtctcaaagtgtgcctcagaccagcagcagcatggcatctgggaacttgttggaagtgcagcttctcaggcccccaggcttcctaaatcaggaactcggggctggagctcagcagcctgtgagcccacaagtcctctatgtgattctgaccccgccttgagtttgagaaccgctttcttaggatgctaatgcagcataatgcttgtctgtaaccttctgaccaccgctgaggtgtgtgggaggtggggaacagctgtggtttcctcggaaccctgagtaaaaccaggtgctcctggggaggcccctaggaccctgcaaagctctgaaccgtgaagtgactcagggtccttctcaagccccacatgtggggaccggctgctctggcagcttccacgggccaccttccagccccagacacatcacatcagctatttaaagctcagctgaataatattttccattatgtggcacagactttacttcggagtccttcagggctgccaagggtcaggtttctcagcttatcgaggactgtctgggacccgagtccatgggagagatctcttgtctgtttcttcccctcctagttgaggcctaatggggtgcaggggttggggaagagagaggggaaatggccttgagtgtcccctgccctgacaggaaagtctccttgggaacatgtaactttcatcgccctttattccatgtgacagggtggcttccagagagggcaaaccaatggcccaaactcacacagctcatgcgggagagctccaggtctcaaataaaaatctctgggtacatcgggctcattgtcccccacactgtgtttgaggggaggcctcttgaccccctccacagtcctcccttccaggctaccagtctgccacctgcagggatttattccagattcaaggtgaggagacacacactaccaggtgacaggaggccccctgctgctccctaagatgccaggagctgtgtttgcaaaacgcgttttgagacgtggggatatggcacccagcagcatcacctgggctgcccaggccctggcagtgggcagcagacaggtcctttccccaggtccagatctctgccatgggcttccccaggcccagtctgttcagacacttgggcagatggcttgctttccagccacccccacagaggggccatctgcttgcatgctcactgtctccgggctatacctaggacactggctctgaggtgtgctcacagttacagcacctgtggggcatggagttgtcagaggggagttgagcttccatgtagtcagtagtcaacagaggccttggtcagtgacccggggccctgggctgctgtggatggaagcagggcaggtgctttcacactcctgtgtccactaggtggaggcttcccctgcggagggtatagaccgggttggggaggggcatgtaggggaatgcatcccctggcccgatgggtatctggaagggcatgtggcacccaccacggtcacatgccaactagccaaggccagtccaggccagctgagagtggggttgggctgagcagccatgtcgcagtaaagcagcagagccagcgtggctgataagatcaaggcaggaagtacctggaagtacctgggcttgaatccctctcagtgcttactagctatgggagcttggggagctacgtgatcgctctgtgactcagtttcctcaactgtaaaatggaaatacgactagcacatattttgttgtgaggactaagtgaatcgtcatatacagagaatttaactcagtggttggcaaagtgcttaataagcagcgtttttgtcctggacaagggctcagtgtgctgaggaacttcctcaaatatagagaggatggagtctgtggtattggaccttggggtgggctgcttggattgaaagatcaatagggtaggccccttcctggcacatattcacccagaaatgcagaaggaataaaccgattaacactcaggttttgagcttctaaataaactttgaagcccaagaagagtttgagaatcctagggcaagagagccccaacaggcagcccgggtcggggctcccccactcacctgcaagaccctgaagcaggcaaggaggctctcggaaggttcccatgtgaccctcccaggctcctggagctttcctgggccctgagatgaacgcagatttcacgacatcctcatgagggaggacgcagaagatgtgggtcatcaactcaagcctgacaggagtgtggcaatgctgagaaccaggcagggggtatgcagcttagcagacactgatgcggacaggtgccgagcatggtggagagctcctgcagatgcctgcatcccatgcgtgcccacctccccactccctcagctaccacttttttttttttttttttttgagacggagtctcactctgtcacccaggctggagtgcagtggcacgatctcggctcactgcaagctccacctcccggattcacaccattatcctgcctcagcctcccgagtagctgggactataggcacccaccaccacatctggctaagtttttgtatttttagcagagacagggtttcactctgttagccagggtggtctcgatctcctgacttcgtgatctgcctgcctcggcctcccaaagtgctgggattacaggctgcgcccggccagccaccgcttttatcaggaacaagaaaggcaaggggaaaatccagatgaaatccaagatgactcaggttatcctgacatggagatagattaagccttctcgcccccaatgaatggggggtacaaaatagagattaagttgtattgttgaagaaaacaaattacagtggtgccccctgaactttggacctgaatgtgttattagagaaatgccaatcaaaaccacaatgagataccatctcatgccagttagaatggcaatcattaaaaagtctggaaacaacagatgctggtgaggatgtggagaaataggaacacttttacactgttggtgggagtgtaaattagttcaacaattgtggaagacagtgtggcgattcctcaaggatctagaaccagaaacaccatttgacccagcaatcccattactgggtatatacccaaaggattataaatcattctactataaagacatatgcacacatatgtttattgcagcactattcacaatagcaaagacttggaaccaacccaaatgaccatcaatgatagactggataaaagaaatgtggcacatatacaccatgaaatactatgcagccgtaaaaaagcttgagttcatgtcctttgtagggacgtggatgaagctggaaaccatcattctcagcaaactaacacaggaacagaaaaccagacactgcatgttctcactcataagtgggagttgaacaatgagaacatgtggacacaggaagtcccaggaacatcacatactggggcctgtcaaggggtggggggaaaggggagggagagcattaggacaaatacctagtgcatgtggggcttaaaacctagatgatgggttgatgggtgcagcaaaccaccatggcacacgtatacctatgtaacaaacctgcatgttctgcatatgtatcccagaacttaaagtaaaagaaaaaagaaagaaaaaatctgttcttccaaactctgccttttaattggagagtttaatccatttacatttaaagtaattagtaaggaaggacttatgccattttgctattttgcctctccatatgttattctttgtttgttcctctattcctccattattgccttctttttggtttaactgagttttcacagtataccattttgatttacctctcacttatttttccgtatattttaaaagcgaccttcttattgattattatggggattaaaactgataccttaaatttataagaaactaatttgaatcaatgccaacttagcttcaatagtatataaatcctctggtcatacagtgtttttcttccctttatatgttgttattgtcacaaattacatatttatacattgccccttaatgtaaatctataattattattttccaaaaatacataatacaacactgcatcccaaaacagtaggacacttatatttacccatgtggttaactttaccagtgctccttatttatttctttgtatggctttaatttaccatctagtgtcttttcattttgacctgaagaactgcctttagcatttcttgttaggcaggtattctagagataaactctttcagattttgcttgtctgggaatgttttattaattcaattaaattttattaattaaattaaaacacttcttcagctttgaaagatagttttgatagatatggaatatttggttgacagtagttttctttcagtactttgaatatgtcatttcactgtcttatggtgcccatggtttttgataagaaattggcagctaatcttattgagaattcttagtatgtgatgagttgcttctctcttactgctttcaaggtgctctctttgtctctgatttttcagtttgattttaatgtgtctcagtgtggatcttttcgtatttagcctatttggggcttgttgagttttttgattgtgtagattcttgtctcccatcaaatttgacaatgttttcagccaatatttcttcaagtattctttctgcactgccctctttctgctttcttctgggggctttgttgggggtattgtcccacaggtccctgaaggtcttcccattttcccccaatctttttatagatttcataatctttactgtttcattttcataatttttattgctctatcttcaaggttattgattctttcctccatcatctccatttttctatgtagcctatccttttttaaaatttcatctactgtatttttttagttataaaatttacattttattcttctttctagctttcatttctttgctgatattttctatctttccattgatttcaaggacgttcaaacttgctggagcatttttgtaatagctgttaaaagtctttgtcagataattctaacttctgtgtcatcttggtattgatatgctgactgtcttttccactaagaattgtgattttcttggttcttcacaggacgagtaatttgggattgtatactgaacattttaaatatttgcatcgtaaaactctggattttgttttaatcatctgtaggatattgatatttttgttttaccaggcaatcaaccttttgaggccacaaattctgaccagtctttttaggttgtggtttcaatgttacgttttcaaatccttgtggtgttattagtatctgttccatgtgtctcacccagttccatctggtatctggatggcggtctgtcccatagttcagttcttgatctatggcatgctgctcatagggagatccatgcatgcacaacttgctgctgagctgtagattcatgatgaacttatgtggctgctttcctgagccccatcctgtccgtgacttccttagtactttctgattcccttagagactcccctttacattcctccagacagaaacatggcagcatatttattctgatctgccatacacctttccaagtgtaccaatgtctatggtcaagcagcaagaggaaagagaaaaagaacaggattttatccttcccagggaggatcaccgctcctccaattggtgagggaagttttcttcatcagagttttaggctcctgtgggccctcgttgtttttgctggtgccaccattggcattagattgtttggaagccagagtgtgagagaataggaaaacaaaaataagggggtgaagatttctacaccttgctctctatgaatgtcagaagaccccttccacactctgcaagtcagactagagggctgctcctggagcagtctctatccatgccaatggtctctatccatgccaatggtctctatccatccaagttttgggctacactgagttcaggccagggaatacagtaagtcctcacctaatgttgtcaataggtttttggaaactgtgactttaaatgaaacaacatttgatgaaaccaattttactataggctacttgatattaacaagagtgaagttcctaaggaatacttctggtcacaaaagcatcattaaacttataaataaagacccaaaacacttctaatattaaacattgaaataaatgtgagctatatatacacttaagaaagattaataaaaacaagtaagatcactatttacccaatttttggtgaatcagtgagtgatggcagtcatagcagtggtgggttaaatcaaggaataaatgtttgcaaagtgaaaatagtaagaagcccctctcaccatcccacagttcaaaaacaagtaataacaaacatggcggccccctgagcactttcgtgatgcatttattgtcctgcatgggtatgattgttgtagagtttatgaattttttattttacagtaattttcttttcctttctttctttctttctttctttctttctttctttctttctttctttctctctttttctttctttctctctttgtatctttctttcattttcctacccacttattccagtgcagggtcataggtgacaagagcctccctatccaggaactcagaacaagtcaggcacaaccctggacaggacgctctctcattacagggatgctcataccatgctaacttatattgagacaatttagacatgcaattaactgaatgtggacagctttgggaaaccagagaacccagaaaaaaacccacaacccaaacagatatggagaacatgcaaactccacacagacagtggtcccagttgggaatagatgtttttctcattgagtttatatgaaatgactttgaacaaagcaaggtaattcaaggacctgttgtactggagggaaataaagcggcaccactgccagtccaatggcacttgaattctagtctccttgcccatctgcctgttactccttgtttttcagctcttcacatggctgctcaatgcatcctttacagggatttggaagcaacaggctggagtgtacttactgcatcttaccccaatccagaacctctcctgtatcctttttaggccttttggggtcactctcatacctccctcatcactgaaaagtacacttgaccccttccctctgtactgctcttttatctattcctaaggcatcctccaacaactgttaaattccagtaaaaaatatgttgttaagttcaatggaaagaatggtcagccaaagaaacccctctgctcaggatggaacaaaagatccaggcccctttcccctgtgaccacttgtcagacaagattctaaaccaaacatgtattgaacaagaattatataattggtattatactaaagttggagcccttgttgatcactgggcgttttttttacattaaaaaggtatatttatataaaatacagataataggaacaggataaagatgatgataaaatacaattaaatattctgctcaatcacaacggtaagagagaaatagtcaaccaatattgctaaattaataacagtgcacattggtacagccttcttggaaaagaacttggaaaatgaaaacccaagaaatattaaagcatttatacatacttgggaatttatgctaaagaaacaattctaagaatgtaggcatataattaaagcatcattactggctgggcacgatggctcacacctgtaataggtcctagtactttgggaagccatggtgggcagattacttgagctcaggagcttgagaccagtctggacaacatggtgaaaccccatccctacaagaaatacaaaaattggctaggcatggtggtgtgcagctgtcatcccagctacttgtggagagtgaggcaggaggatcacttgaacctgggaggtcaagcctgcagtgagccaagatcgtgccactgcactccagcctgggtgacaaaatgagatgttgtctcatttaaaaacaagactaataaagaagaaaagagagaagaatcaaatagatgcaataaaaaataacaaaggggatatcaccatcaatcccacagaaatacaaacaactgtcagagaatactataaacacctctacgcaaataaactagaaaatctagaagaaatggatacattcctcgacacatacaccctcccaagactaacccaggaagaagttgaatctctgaatagaccaataacaggctctgaaattgaggcaataattaatagcttaccaaccaaaagaagtccaggaccagatggattcacagccaaattctaccagaggtacaaggaggaactggtgccattccttctgaaactattccaatcagtagaaaaagagggaatcctccctaactcattttatgaggccagcatcatcttgataccaaagcctggcagagacacaacaaaaaaagagaattttagaccaatatccttgatgaacattgatgcaaaaatcctcaataaaatagtggcaaaccgaatccagcagcacatgaaaaagcttatccaccatgatcaagtgggcttcatccctgggatgcaaggctggttcaacatatgaaaatcaataaacgtaatccagcatataaacagaatcaaagacaaaaaccacatgattatctcaatagatgcagaaaaggcctttgacaaaattcaacaacgcttcatgataaaaactctcaataaattaggtattgttgggacgtatctcaaaataataagagctatctgtgacaaacccacagccaatatcatactgaatggacaaaaactggaagcattcgctttgaaaactggcacaagacagggatgccctctctcaccactcctattcaacatagtgttggaagttctggccagggcaattaggcaggagaaggaaataaagggcattcaattaggaaaacaggaagtcaaattgtccctgtttgcagatgagatgattgtatatctagaaaaccccatcgtctcagaccaaaatctccttaagctgataagcaacttcagcaaagtctcaggatacaaaatcaatgtgcaaaaatcacaagcattcttttacaccaataacagacaaacagagagccaaatcatgagtgaactcccattcacaattgcttcaaagagaataaaatacctgggaatccaacttacaagggacatgaaggacctcttcaaggagaactacaaaccactcctcaatgaaataaaagagggtacaaacaaatagaagaacattccatgctcatggataagaagaatcaatatcgtgaaaatggccatactggccaagggaatttatagattcaatgccatccccatcaagctaccaatgactttcttcacagaattggaaaaaactaccttaaagttcatatggaaccaaaaaagagcctgcattgccaagtcaatcctaagccaaaagaacaaagctggaagcatcacgctacctgacttcaaactatactacaaggctacagtaaccaaaacagcatggtactggtaccaaaacagagatatagaccaatggaacagagcagagccctcagaaataatgccacatatctacaactatctgatctttgacaaacctgacaaaaacaagcaatggggaaaggattccctatttaataaatggtgctgggaaaactggctagccatatgtagaaagctgaaactggatcccttccttacaccttatacaaaaattaattcaagacggattaaagatttaaacgttaaacctaaaaccataaaaaccctagaagaaaacctaggcattaccattcaggacataggcatgggcaaggacttcatgtctaaaacaccaaaagcaatggcaacaaaagccaaaattgacaaatgggatctaattaaactaaagagcttctgcacagcaaaagaaactactgtctgagtgaacaggcaacctacagaatgggagaaaatttttgcaacctacccatctgacaaagggctaatatccagaatctacaaagaactcaaacaaatttacaagaaaaaaacaaacaatcccatcaaaaagtgggcaaaggacatgaacagacacttctgaaaagaagacatttatgcagccaaaaaacacatgaaaaaatgctcatcatcactggccatcagagaaatgcaaatcaaaaccacaatgaggtaccatctcacaccagttagaatggcaatcattaaaaagtcaggaaacaacaggtgctggagaggatgtggagaaataggaacacttttacactgttggtgggactggaaactagttcaaccattgtggaagtcagtgtggcaattcctcagggatctagaactagaaataccatttgacacagccacccattactgggtatatacccaaaggattataaatcatgctgctataaagacacatgcacacatatgtttattgcagcactattcacaatagcaaagacttggaaccaacccaaatgtccaacaatgatagactagattaggaaaatgtggcacatatacaccatggaatactacgcagccataaaaaatgatgagttcatgtcttttgtagggacatggatgaagctggaaaccatcattctcagcaaactatcgcaaggacaaaaaatcaaacactgcatgttctcactcataggtgggaattaaacaatgagaacacatggacacaggaaggggaacatcacactctggggcctgttgtggggtggggggaggggggagggatagcattaggagatatacctaatgctaaatgacaagttaatgggtgcagcacaccaacatggcacatgtatacatatgtaacaaacctgcaaattatgcacatgtaccctaaaacttaaagtataagaataataaaataaaaaaaagaaaatgcaaaaacaagtcattattaaaggattatctctaataaaactagagaacatttaattaaatattgtacataaatactatgttatgcaatatggtaatttaaaataattattttaagtatatataggagcaaacaaagttgtttatagtataatgatggatcaattgtcttgctgtgtaattttaacacttagctagagcagaatgctttttgttcctgaaacaaaaaggatgctacccaaatgaaagggacaggaaagaaaactttaacagaatatttattaaagcccatcacgatataaaaatgaaaacactttatatttgtactccacctagcatgttaaaaaaaacccaactctggccaggcatagtggctcacgcctgtaatcccagcactttgggaggctgaggcaggtggatcacgaggtcaggagtgaaaccccgtctctactaaaaaaaagtacaaaaagttagccgggcgtggtggcaggcacctgtagtcccagctactcaggaggctgaggcaggagaatggcgtgaacccgggaggcagagcttgcagtgagccgagatagcgccactgcactccagcctggacaacagagcaagactctgtctcaaaaaacaaaacaaaacaaaacaaaaaaccaacaaaaaaacagcccaactctatcagtagcatatatttatcttttatattgccaaattgttcaatcctcattcattttagtaggttgttcttagcagtgttctggattttctaagtatgcaagcatacagtcttcaaatgaagttaattttgccctttcatctttaatgttagtcttttttctttttagtctttttctttgagttctataatattcatcttgagtgatttgtcttacaacagaaaatgcttcccaatgttgtgacagcagtattgatatataatacaatccttttctgttacagaatatttaatgtaatttatgatatgaaaaatgtaaaggagaaaaaagttattatagcaaataacatttagcaaatgctaaaaaggcattttacaaaattccacattcaatctttatgaaagttctaatcataattgaaatagggaggtataaaaaatgaaaggaaacatttttccccaaaactactaacaaatacctattttgtacatcactacaaaaatatattcaagtagttatcgaaagcaaaatagacaaatgggatctaattaaactaaagagcttctgcatggcaaaagaaactatcatcagagtgaacaggcaacctacagaatgggagaaaatttttgcaatctatccatctatccatctgacaaagggctaatatccagagtctacaaggaacttaaataaatttacaagaaaaaaatcaaacaaccccatcaacaagtgggcaaaagatatgaacagacacttctcaaaagaagacattcatgcagacaacagacacatgaaaaaatgctcatcatcactggtcatcagagaaatgcaaatcaaaaccacaatgagataccatctcacaccagttagaatggtgatcattaaaaagtcaggaaacaacaggtgctggagaggatgtggagaaataggaacacttttgcactgttagtaggagtgtaaactagtgtggtgaatcctcaaggatctaggactagaaataccatttgacccagcgatctcattactgggtatatacccaaaggattataaatcatgctactataaagacacatgcacatgtatgtttattgcagcactattcacaatagcaaagacttcgaaccaacccaaatgtccatcaatgatagactggattaagaaaatgtggcacatatacgccatggaatactgtgcagccaaaaaaaagatgagttcatgtcctttgtagggacatggatgaagctggaaaccatcattctcagcaaactattcgcaaggacagaaaaccaaacaccgcatgttctcacttataggtgggagttgaacaatgagaacgctggacacagggcagggaacatcacacaccggggcctgttgtgggggtgaggggatgggggagggatagcattaggagaaatacctaatgtaaataatgagttaatgggtgcagcaaaccaacatggcccgtgtatacatatgtaacaaacctgcacgttgtgcacatgtaccctacaactgaaagtataaaaaaaaaacaactgtgtatggtgacataatatctaggtaccataatttatttaattcatgagttattatgttaagttgaatatccttgtgaactctcattacttttttttttacatttattttttttggcaccatgtctacgaactctttgcttaactccaagtcatgaatattttattctaacagtttcatgtttttacatgtacatttttaattctgatccattttgagttatttttttaaaaaggtgtgtgcttaggtggattgttttgcatatgaatgccaaattgtcattttttgaaaagactactcttcatccaataaatttatcttgtaccttccttaaaaatcagttggtcttgaaaggccaaggtgggcggattacgaggtcaggagatcaagaccatcttggctaacactgtgaaaccccttctctactaaaaacacaaaaaattagccgggcgtggtggcatatgcctgtagtctcagttactcaggaggctgaggccaggagaattgcttgaacccaggaggcggaggttgtggtgagccaagattgcgccactgcactccagcctgggcgacagggcgagacgctgtctcaaacaaacaaacaaacaaacaagcaaacaaaatcagttgatcttatttgtgtggatctatttttgggctctcgttttggtctattgtcttaattactatagctttattaagcgtaagtgttaaaaccaaatagtgtgatttctctaactttacgcttcttttaaaaagtcatcttggctattctaattcctttgccattctagtacatatgttttagaatcagcttgacaatatcaatgaaaaattctgttggaattatgatttacatttcctaaatttcataagacatcaacttatcaaaaaaatgtattcttctgggaattgagccatctacacttgtggaataaactctccctagtcatagtatatcatccttttaatacagtgatggattcaatttgccagtgcttcatttatactttgtatctatagtcataaataaagttggcctagagtagtgggttttatttcatttgtttgttctttgcttctctttttttaaaaaataaatcctatataaagtttttccagtatggttacacaaccttcattgaacagatttgaaaagttgttcatctttttctatggtctgaaatggtttaatataggaattatctatgtttttctatagactttctgagtctctgcatgtctaaaaatatctttgctatgacagatgattgatattatggctggatatataggattcttagaatactgtccccattcaatcatttttaaatgtttttccagtcttacctctagtgttgcacacaagttgtctgatggtagcccattctttttccgttgtaagtaatctatcatttctttctataagtatgtaatattttcttttccataattggaatacaaaaattttatcaggacatgttactggaggtctaggttttttaaaaattataattaactttacttgggactcaattgttttttgtaacctgaaaactcaaaccttttttttctaagacatattttctctcttgattaccctatttattacttctccatctgttctcttttccctttctagtgaacttttattagtcacattcagatatcctggatctgtcctccaagtttcttttcttaattcttcatgaattccacatcatttataaaatacttcttccagttgagcttccaaaacagtcatatggtcctcagcaaagaatggtgtcttctcagcttattgaacttgtaatttcaaaaataagtattctggttctagaaaatcttttgttctgtgttaaatttaatgcccttcgggagttctcatttatttttgttgttgttgtttttaagttcatctgtcttttccattagctttatttaaacaattgtcatctgctcttcttttaaacttagtattctccctcgggttgctggaattccttaatctggcagttctcaacactggccacacatgagaatccctctaggggggttacaaaagtcccaatactcaggaaacggtgaaaccaattaataaagactttctgatggtggaacaaaggcatcagtagcttttaaaactccccaggtgattccagtgaatcagctaagaataagcattactttcttaaatgggcctcattttatttatcttctcaggggtgtatattcctttagaatttttacaggttatagctttagtatcacaactggcagatggtgtaagggacaaacatttttgctctcattaggttgtggggtaaaactcagaaaactgggttcactttgctggagtatgggaggagcctctctgtcattaggtcttttttggggcaagtgacagcaactccctcatctacagaaactggtgccaatgcacttcagtattcagcagctttccaggttcacaaaagtctgtggactagggaagccttctaaggaccacatgcaaaacagggagcaggggcaggcaagagctttctcttcgaaggtgattgttggttgtgacttgctagttccagatggaggtaaacagctatgcatgtaaacacccgtatttccagaatcccctctatgatttcccctgataattaaaactttattaccatttagatttgtatgatcacatgatcagtgtgaatgtaaaatgtacacagcctccaactgggtgcatcaagaatctcatgtaatccacacaacaacatggatgaatttcaaatgcatcatgataagtgaaagaagccagatgcatgaggctgaacaccctgtgattcatgtatatgccattctggaaaagacaaaccagagggatagaacacagatcggtggtgaccaggggcaaagagtcaggggagggaattggctacagaggagcactggaggaaattgggtgtgatcgaattcttctatatcttgattctggtggtggttacatcattatatgcgtctgccaaaactcacagaactgagcattaaaaatggtgtgttgtattacatttaaattatacctcaataaacccttttggaaaaaaaatcatgtgtcatctccattatactgaactctctgcagatccccccaaatctctcttaggcttgtcagcctttgtctactctattttctctgccaagacattttcatttaatcgttaagacttggattagatgctacgtcctctgggaaaccttccatttttctgcatgactcttcttggtgtttctttgctatcccagccccgtttgtgtggtgttgaggtgcgtgtctgtgtttgtattctctgctagactgtaggatcagtaaaagtagggatttcatcctgtttatcatcattgtattcctatcatctaccttagtcttgctaagtatctggtaatctataacttgcaaggataaagtggctactctccagcatattcaccaggactttctgttttcggaaacctccctggaagctccaaaaaattaagaaatatcacagaaattacttgcaaaatccttgcactagagcagacatgcttgactatggagccactgagcttataaacctgagaggtggatacctagaggaagatattttgagaagatggaagtgagttccctgaaaatccatggtccataacaccttatccatttttatagccacaatcgacaagaatgctcatcctatttgctttccttgcttgacaatataatttcagagactggtgaaagatgttttcagcactagaatcaatacttcggattacagctgcttttgtgctcgtctctccccagtgaaaacattgctggggaaatgggaagatatatggaagctccatatctcctgatattttagctctcaagaatctgtctgttctaatcaattgctgcatttattttgaagaattttgaaggcaggggtacagggtaagaggagagaaatgataactttgaggcacttgttctaaagctgttgtatctgaacaaataaggagccatacgcccacctctgattcagaattgcatttcttttcctacagatcccaagccaagggcatcttgtaaaagctcttagtgtagttgggaaatgcctccatatttctcttaatctatactttcaaggaattctcattcaagatggaggatagaccacctgcattgggagaacgggccatcacctcccttgatagccaaatcccacagaaatgtccatctcaggccacaccctcaggtgagccagaaatgtcactttttctgcttgtccttaacagaattgatttctctttgcatttgtctgagtggtggagactttctctctttcagttcagggtttctcctcctgtaacatcccagttgcattaagttctgggaaacttcagagagccaaagtgttcagggattgggggtgaggggtgcccatctttttctcagtttcagttttccatgatagacctcattccatctggccctcagtcattgattcatgctagcagtttcctcatagatatccagttccattatttgtttatttatttttgagacagggtcttgctctgtcactcaggctgcagtgcagtggcatcgtcataactcgctgcagccttgaactcctgggctcaagcaatccttcctcctcagcctcttaagtagctaagaccacaggtgggcaacaccatgcctggctaattttttaaatttttttgtagagacgaggtctcactatgttgcccaggctggtctctaactcttgggctcaagcgatcctcctgccttggccttccaaagtgctgggattacagacatgagccaccactcccagcctaattccattattatatccttcttcaaccaaactgctgggcctctctctctgtcacacagaacatttttgttctttccctcattatgcaagggatctcttagcctgttttggcccatctacttagagaccactcatggctgccttaggccctagaggcatgtggcaattatgtttggctcctggggcaatcaggaagtgaggtgtcaggttcttggttccctggagttccagttactaccccaagtttctactttattggagctggagatgggtgggcttggggtacaagtccctttctcagggcagccgtgagagtctaggttactagacgccacacaaacatatagattaggttgaaccatataaaattgtcaatttttttttgttaagtctggttcaatagtagcaattttatacattgtgagctatacataccaaattatgatacacattcctcaatctgttcctcaactttgcaaagggttttgttttgttttgctttgtttttttgttttttttttgagatagggtcttgctctgtcacccaggctagagtaatgcagtggctccatcatagctcactgcagcctcatcttcccaggctcaagtgatcctttcacctctcagcttcctgagtagctgagaccacagacatgcgctaccactcctggctaatttttgtatttttttgcagagacggagttttgacatgtcgcccagcctggtcttgaactcctgagcttaagcgatctgccagcctcggcctcccaaagtgctgggatcacaggtgtgaacaaccatgcccaactgcaaaggtttttgttagaatttttccagcagattttattcttccttggtaacctttacttgtttttgcaaactaatcagaaacttttgtgcttgcctattttgaacaaagtgttttaaaacccccgacactcttcatttggaagatggtctaacacgctagaaaaggtcccaaatttctaaagtgtgaaaatagcagcatttttataggtaaaacacatgattttggggaaaaaaaaattcatgtcacatacccaaacatctctttaaaaaatgttctctttataatagacatttctttgaaaaacagtgtcttttccctctttgtttaaatgtcatatttaccttgagtggacagtgaggcacttcttttaaaaagaaaatatttgttagatagcaaagcaatgacagccacttgtcatcacagaggagatcagcaaatttgaaacatttgtctttttgtaaaagaaaagtgtataacacgtctttaagtctgacaaatcttttaagtactttgctgtgagataacgtacaaatattcataggtcacaaaaaaattttaagtccccttctattatgaagtgttataaaaattctacttgatcttaaaggtcctaattttataagttttccaacatcattgacatcctgtaatccttggtacttctgactgtaacatattagccacaagagtgcgcccagcatgaggcaatgtgtgacatgtggcatgtgtcataccatcctagcagccctaccccaaaattcctttttaatcttttaagaacttgcatttatttaaggaaatcagttgttaagattatatctttctttgcacgtctttactatactgatctcctaaaatacttctttgtggattatcggaaccaatctggcaaattccataagctaaaacttgttagaaacatctgtacttgatccgtttacagtcttctgcactgaatgcttgctcaaatgcttatttcctcagtggcgttttctgtgagtattccaacagtgtttgctgatgaagggatgtgttttcatttgttgccatactgttttccatggattcttttagtcatcttttattgttgaagaaagacaagtgttttttcaaaggtaaggtagctttctgtccaccaataaataatttttttgaaattttgtaaggtagtaaagtagtttcagttaaacatcactgaaaaaagtcaaggtttgccttcttgtttttgatgcttttcaaaaaattgtcttgctgaacgtgatggttttatccagccattctgaactgaattatgacctacagaaagtgatttgaataattttcctgtatttctctgtatggctagctagtactattctagatgcacagggtgaagctaatctcttacattcagtggatgtcttaggtcattaggacttaatttcctggaatttcagttgagaaacttactgtattaatccattttcatactgctataaagaattgcctgagacggggtaatttacaaaggaaagataggtttgattgactcacagttcaacatggctggggagacctcaggaaacttacaatcatggcagaaggtgaaagggtagtaggcacattcttcacaaggtggcagggcaggatggagtgagtgcaagcaggggaaatgccagacacttataaaaccatcagatctcctgagactcactcattatcatcagaacagcatgggggaaaccacacccatgatccaattacctccacgtggtcttattcttgacatgcagggattatggcgattacaattcaaggtgagatttgggtggggacacagagccaaaccatatcaaggaatatttaagattttaaaaaatcactatcaacccctttgcatcatagaattctcttccttccttcaggatccctggggacatgactagcacacagatcctttggcaatgccatgtcattccatacattaactctcggaaggctaaggttgcttttggttaaaaaaatataaatatgggcttaaatatttaatttgataaatattttatttctgtacccccaaagaagtgcctgccctatcccctggagtgtggacacctcattccagagatcataagtttagggcacaaagtgtcactgttctttatctttattatttacttatttatttgtttattgagtaatcatgccagtaaaacttttgcattgagaactgagaaatagtgaaagggggataaaaataaagtccagtttctataatagaaaaaggctggatgcacataggatcccgggagtctgtggtagattattttctttgttgtgccgcactgttgcagcagaaccctacttatcctgcagaggatgccccaggtaacttcttcatcctaggttacagaatgtaagttacacagagcagaaccaaacttgccctgtagcgtggagccaacctctgctgaatccaacagagctacggctgacctgcagatccacgagtagtatcacagtaaaataatggaacatgacaaacttttgcacataaacctatgagtgtgctcagtgttgagtccagcatcaaggacctttgctctctccaatcctaagttgtatgaagagttcttcacacagacacttacatgcacacacattctctgagcaggtctgctcagaattgcctggctgtgactttgttctcaaaatatgttggtgtttggcagctatgtcagactatcagccagtccctaaatacaccttattatttctcgtcatttatgtctctgggatgaaaaatatatcagcctggttggtaagaacagagtcgctaaatgtgttaaagaaataaagggtttcatacaggattggggcttacccaaacatgggaggggctgggagagtcatggtctgaaggctgcagttaaagggtaggagaaacagtcacctacaactcagaactggaaagactggaactcttgggcgtgcctgagaagctgctgtgactgcctgccagagtgggagtgcccagtgaggtttgctaaaccacatgctccctaaaactgcggtgtgagccaacatgacctcccaagagctttcctcctgccttcccaccacaggcttctcattggtaataagattcatgttcaaacctggaacctctcagggaaaggagtgctaggaagtggctccaagtctcagatgggactcctgggggtgccacgttgataacaggtgattcagcagaaggactgacatttgtgtgtgtttaccaatctagggctttacgtacctgagtctgtttgactcctgcaacaatgttgaggagtaagagctcctccaggtacacagctgctaagtggacaagacaggacatggtcttcctgcttagttccttcctgaccacgtggcattgctaggggttatccatctgtttcctcctctagacttcaggttccttggagaggggatctctcttatgcatctttgtatcttcaatgaagtagaatttttgtacaccttagtatagcatctgcatatgaaaagaattcaatacttcttttttttttttttttttttatagacaaggtctcattctgttgcctaggctggatggagtacagtggtgcaaccatagctcactgcagcctcaaactcctggactcaatggggtcctcccacctcagcatcctgagtagctgggcctacaggtgtgtgccaccctgcctggctaatttaattttttctttttttagagatggggtctctctatgttgcccaggctggtattgaactcctggcctcaagtgatcctctcacctcagcttcccaaagtgctggaattacgggtgtgagccactgcactcagccagaatttaataaatttttttaaaattgaagtgtttagatctagaaacaaagagccaagaagatgctcaccaatacatatctttcttcttgtcatttaggttatatgtattttgaaacaggaaatctcgccatcctcaccaaagccatttccttgagaggattttatctggtttgtctccttgactccaggcagggctccattccaaccagatggaaggtaatcttttatttaatttatcttctaattatttagttaatttaaagatttttttgctctctctcctgaagttgctcaggaatatgaagaaaagggagggaggccagaccaggccattctcaaacagcatagaacttcccagtgactggatgaaagatttgcatttcagaacagcagctgttagcttggttgctggaatttgctttccctctcaaccccccagccagcctgtatctctcagcttctaaaaatataatcttattcttgctctcttttcaacttgaaatggacatagaatgcagacatctcacatcatttacacccagaaggctgtcagcagcagcgctcagggagtgagagtgtttaatctcgaggaggaaatagaatgtatacacaccctgcaaactgagatgttttacgttggctctggctcctaccgccccccatgtgtggcagcagctaccaagactctactgtgaatccccatgactggtaagtcctgttgatcagaacgatcgcgaatgttttcctgctccgtagacacggggcccagccaggccacccagtcatcattaactgggctgctggtccagccctgtttgctgactctaccaggggtaactatttcatgacaagtttataggagggagaaatcaaaagtacaaccttactttttgctggtctcttccatcctctgctggcctcatgtgacctcccgaacatggcacagtcatcaccagctcccgttggtccctggggtggtttggccgcagttacattggcacagtcattggaaaaatcatttctgtacatcgcatcactggtgcatctgggcttctgcctgaagcacatgtcaggaggaattgttggcaaccctgagggcaaggacgcatctgccttgggctccaggggtggtgtggcttgctggagtgggaggtgcgcagcccagcagggtcagacatttcagtatgccaccccacccaccacaccctactcagagtgcaggcccctgcggcaaaagcctgtgcatgtgcttttctctcacggccctcaagagaggccaaagcttgtgttactctcacttgcatcctctgatgacctaaagaggggagagaggtcattttcatggggccaattctattctctttttctcttctcccttctcctcttcttcctctttttccccatgacatatgtattaaaaagtccacagactctggtgtacttctggtgggaatataattaatatgaccattgtgatatactgttagtaacatctcataaagccaaatatatatggatacagtatgacccagcaatctcactcctagaaataaacccaatagaaatgcatgcaatagtgcatcaaaaggcatgcactagaatggtcttagcagcattattcatagtagccccaaactggaaataatacaaacgtccatccacagtagaattgctgaacaatttgtgctatacttactacagcaatgagaatgaacaaaatgaacaacctgcagcaacatgaatggacctcacaaggataatgttgaacataagaagccaggcacaaaagagtgcatatttttgtgtctgactccattacatgaagttcaagaagaagaaacattaatgtatggttttggaaggcaggatgtggggaggtagttggggcatgaggaggttttgggggtacagggtggtggcagtgttttgcttctggttctgggggatggctaagtgtgtgttcatttcatgtaagttcatatgcatttgtgcaattgcctgtaaagttgtcatacttcgataatattaaaaatatgaaaaataaaaatataaagcccatatgggagagcacacttctctgcattttttttgcactttggcgatgagctgacagaggggttgttaacaagcaccctacttgctcactgtgcttggtaggatcctcaacctagcgagtcccaccccattccccggtccccaatctcaagctcaaatcccacacttcccccttctctctaatcacaccaccagccccttctcctactttccctccctcccagcatccgtaaggctcgactcatggctctaactgctgtgccctgcagtgcgggggccttaacagggctagccttacattccagctgctcgtggtgcatactgagggactcaaagcaagactgccttctctccgtttctctgcggtatctgcaacctccatattgcttagttctttaagattatgacattatatattcctacttaaatgttaaaatggaagtagcatgctaatactatcttcaaatccgtccatcagcccaacttcgcattcaggttccctgtgagcgagagaaccttccgtcaatacccgcttgaaagtggccatcggacttttgaccttcaagttttgaagaatggtctgaacattttattttccttttgtgtttaataattgtatactgtcctttcttgacataaagttgtggctatcagagatatttttaatccagtgatttttcaaactgcttttgttatctgctaaagcccttcttttaacactgtctaaatgagaatagacgcttatgagagattagagcaaagttgttgggcagtgggggaggggacttccagggccctctcagctccttcccagtgtccccacacaggtcagtatgggggcccacagggcctcaggttggagcatcaggtaacttgctcaatctctttattttacagtctctgctccaggtcaccctggccacactccagagccaggcagagactctccctccaaaaccagggctctttcctctctgtttcagaaggaattctggctttccgtctcacctcaacatttgcaattagcatccccttctctgcttcctcatgagatttcccctcacattgtgcacattttgatttgggtgtgtgcttgcattctgatgattggaagtccaacttcttagacacttgtaatccctgatttaggcctgcaggtttgtgctagcagaagttgctggaaaatgagtctgggtcctggggctttccccagggaatctgagacttggcttccaggttaagggagcatggagtgggttctgcacagagagacgaccaagggccaactgagcttggaatctggaagagtccttcagctggtcatttgctgaagtagttgcatatgagtttgttgaatttggtggacacaatcaatcactgaacacactatttaatgctttagaatggtgtgtatgtgtgtatgttgcatatgaattgccaaagccacactagtcagagactctaggaacacacttatcaagcaaggttaggttcatttaactttctgcagaagaggaaagcacacaccaggggaatcgggtatctcagaaacaggacactgggatggggcttctgatagggtgtgggcttgttgggtgattctaaggagggtttggggaagtggaggctacttctgggttgggtcttattagaaagcagaaacagttctgttgttgagtatcttcgtaattgttatctaggaagctggaggattaaaatggggctaaagttatcacttggtaaagaaacagaagctaattattagttaattttgtggttgcagtgtgcccttgcctctaattaggtttagacataattatagagggctcttgtttctgtcttgtttcatcctggtcactgagtgtccttgtctgaatgcctgtattctgtgaaagttgtttaaactcagtaggcagcactacaggctgcttgctgtttgaggtcagctgtcatggctgtttgttaaccacacacactcatgtttatattatatgagatatttatattatatccatatccatattcatatttgtgcaatgtgaacatattactaaatgatatagtatatttgcaagtatccagcatgtgtgtctggcatatacaatctggagagacaatctcacatcaagtttactagcatgagctttggaatcagacagacctggggttctaatcccttaagtagatttcttcatctaagtttcaattctctcatccataaaatggggatggtaatactgatgatatatgtctaccacgagaagtgaatggatgtatgcatgcaaaatgataagcacaatgagcacacatgtgggttaaaccctttggtccccacagccatcctgagatagggactaggatgacatggccaggatttgtggccgagcgttctgatgcctgagcccggctgtgacagttgtactctgcttcctggtacttggcagatactccagagatggtcactgaatgtcagtgcacttggggagattgcatatatgagtacttcatcaaagccagttgcaacttaccagcaggaagaaatcagcacttccactgttggtgtcagtgagatgtgcaggacaagcaagcctggcttactgacggacagtggagaacactggggcctatgactgaggcaggaatgttgcttatccacctgctctgacactgtttcttctcagagagactgctcccgtgggcaatggagtcacatgacccaaactggccactcagagtccctttccagcaacttggctttggttggtctctgttgggtgttgactggagctgccatgagggatgaggctgaactcttcccaccaagtgcttagaggagatgagacctgtactcagtgacagaggatgcaaatgagcagagaaggagaaatgagaagtcattagcctctggaagagttttggccaaagagttagggagaaatttgtctctttcattccccactaaggcaaaggaaggcggtgattggctgtcacttagaacccatgagcaaacaagcatgatttctagactagaaaggacaagacaggagatctgtagaccagtgttctaaaagtatggtctccaaaccagcagctagagcttgttagacatgcaaactctcaggcctcactggagacctaaggaatcaggaactccaggagtgcagcccaggaatctgagctataagaagcactgtgggggccaggcgcagtggctcacacctgtaatcccagcactttgggaggctgaggtgggctgatcacaaggagatcgagaccttcctggctaacacggtgaaaccctgtcactactaaaaatacaaatacaagctaaaatacaaaatacaattacaaaaaaaatacaaatacaaaaaattagccgagtgtggtggtgcatgcctgtagtcccagctacttggaaggctgaggcaggagaatggcatgaacccgggaggcggagcttgcagtgagccgagatcacatcactggactccagcctgggtgacagagtgagactccatctcaaaaaatacaataaataaaaaataaaagaagcactgtgtggattctgatgccactcaaggttgagaaccactgctgtgggatggcagggtctcccttaacacatgtgtggaggtggtcctctacgtatgtgccttgctttggagcatagttcacagttaaggctgtttagtccgtcttcttgctctgaggatgaaaagccatgacaagtggctgtgagaagctgcaggcctcaacaggggactactctgcgggttcccaaccacacctgggttctttgtgggttttcctatccaatcctagaccctaagagacctgaagatatcatgtctccaggcttatgacagaacctgggagctgccctttagggctgttccatgtctaacaaaggtatggacaaagctgaagatgcctgaggaaaatggtcttagctttgatttgctgcaagaagttttacaaagtacgctgtgtcagccctggggtttctggaattaggaagcaggcacagaaagaaacggagtttactagctagctgggaaaccaaagtgaccttcttgttggctttgggaagttatgggttactgatagaaataaccctgttttcacttttccctaccaagtttcccagtgtcttgggcttatttaggttccttaagggattctcaaggccacctcagactttccaccttatgacctgtccaacccagtggcccttctccctcctctaaaaacttcaggctgagcagccacacacacagaatcactgtttttctgcctaaacctccatctcttggttaaccaagcacaatgcaccaaacagcattattttacagctaaacaaattagtacaattttagctaatttaatttttaaaaaggcattcgtttaatcctttttgtgaaaaccaaagtgtcaccatttatattaacaccaaaaaaagttcttaggtaaggcataaagtgaataaaatttgcaaaagatctatacatatctatgcagaaaactacaaaacttttgaaagaaagcaaagaagatctattattgataatggaaggatgttctgtgttcaggtattacaagattcagtattgttaagatgtgtgcttttctcaacttgatctacaggtttaatgcaattccaacgaaaatcccagtaaggtattttgtgggtgttgacaaattgattctaaagtttacatggaaaggcaaaggaaccaatacagccaatacgataatgaacaagaagaacaaagttggaggactgacattacccaacttcaaggcttactatagtaatcaagacagaaattaaatgatcaagacggtgtagtattggtgaaggaatagatacataggccaatggaacataatagaaagcccagaaatagacccacacaaatatactcaactaatatttgacaatggagcaagagcaattcaattgagcaaagatagtctttttcataaatgatgctggaacaattgagggtccagaagccaaaaaaaaaaaaaaaaaaaaaaaaaaaaaaaaaaaaaaaaaaaaaaaatctgggcacagatcttaaccctttcataaaaattaactcaaaatggatcatagacctcaatgtaaagcacaaacctgcaaacatgcaggacaaaccacaggagaaatcaaagtgaccttgggtggagtgatgagcttttagacaaaatactaaaagcatgaatctatgaaagaaaacgcttatttaaatttgactttattaaaataaaaaacttttgcactgcagaagacattgttaagagaatgaaaagacaagtcacagactgggagaaaatatttgccagacaaatatctggtaatggacttatatctgaaatataaaaagaactcttaaaactcaacaacgacaacaacaaaaactcatgtgggtccatctggaaattgggatttttgtccaatttaaataagcaaaagatctgaatagatccctcatcaaagaagatgtacagatggcaaataagcatatgaaaaaatattcaacatcatatgccattagggaattgcaaattaaaacaacaatgagataccactacatatatattggaatagccaaagtccagaaatctgacaatactaaatgccagtgttgatgtgaagcaaaaactctcagaggatcagggtaagatggcagataggaggcaggactagcttgcagctcctacttggatgaacagagcagcgcatggagactcacatcatgaacttctgctctaagaactgctgcaggaacataccaggaaagccgagagaatccacagaccctttgatggcactggatcactactgcagcctccctgagatgctgaaaaactgccaaagcagcttgctttctcaacagggtggctcatggtctgggacaagttctcagccctggtcactggctgcctgaaaatacacacagtgctgttgcggggggcacagtggaagtgagaccgacctttagaactgccggctgcatgggagctggatgaggccagtgattgctagctttcttccacttccctggtggcctgtgtgactcaatagaggcagccataatcaccctgggaacataactccattggactgagaaccacacccccattccccaatagcagccgcaacaagccattcccaaggagaggctgagctcagacacgcctaatcctacccccacctggtggtctttctttacctgccctggtagctgaagatgaagttcataatctcttgggtgctctatggccctgctcactagctaagaatcctgaatacttaaccagctgtcccttgggcaagtttgcatcctccctataggaccacagctaatgtgcacttgaaagcgccacctcctggctggaggccaaacaacataaaaccagcacactaaaaacaaccaaggaccatcacagagtccatttcactcccctgctacctccaccacagcaggtgctggtacccatggctgaaagacctgaagatgtatcacatcacaggagtatttacagacactcccccgtaccagcctggagcctggtagcctactgggtggctagacccagaagggcaaaaacaatcactacagttcagctcccaggaagccccattcccagggaaaggaggagaataccacatcaagggaggaccccatggaacaaaataatctgaacagcagctcttgaatcccaggtcttccctgtgacatagtctacccaaatgagaaggaaccagaaaaacaattctggtaatatgacaaaacaaggttttttaatacatccaaaagatcaaaccagcccaccagcaatggatccaaaccaaaacaaaaatatctgaattgcaagaaaaagaattcagaaggtcaattattaagctaatccaggaggcaccagagaagggggaagtccaacttaaagaaatcaaaaataggatacaggatattaaaaaaaattttcagtgaaatagcataaataaaaaacaatcacaacttctggaactcaagagcacacttagagaaatgcaaaatgcactggcaagtcttagcaaaagaaccaaataagcagaagaaataacttcagagcttgaaggcaaggcttttgaattaacccaatccaataaagacaaagaaaaaagaataaaaaaatgaacaaagcctccaagaagtttgagactatagtaaatgtccaaacctaagaataattgttgttcctgagaaagaagagaaatctaaaagtttggaaaatatatttgggggaataatcaaggaaaacttccccagccttgctaaagatctagacacccaaatacaagaagctcaaagaacacctgggaaattcactgcaaaaagataatcacctaggtgcataattatcaggttatctaaagtcaagatgaaggaaagaaaagagctgtaaggcaaaatcatcaggtatcctataaaggaaaacctatcagattaacagcagatttctcagcagaaaccctacaagctagaaaagattggggttctatttttagcctccttaaaacaattatcagccaagaattttgtatccagcaaaaataagcttcataaatgaaggaaagatacagtcttctccagacaaatgctgagagaattcactactaccaagccagcactacaagaactgctaaaatgagctctaaatcttaaaacaaagctttgaaatacaccaaaatagaacttccttaaagcataaatctcaaggacctatataacaataacaatgaaaaaaacacaaggtattcaggcaacaaatagtacaatgaatagaatagtaccttacatctcaatactaatattgaatataaatggcttaaatgttccaagtaaaagatacagaatggcagagtggataagaattcaccaatcaagtttctcctgtcttcaggagactcacctaacacataaggactcacataaacttaaggtaaaagggtggaaaaagatattcaattcaaatgaacaccaaaagtgagcaggaatagctattcttatatcagaaaaacaaactttaaagcaacaacagttaaaaaagacaaagagggacattagataatgataaaaggactacttcaacaggaaaatgtcacaattctaaatatatatgcatctaacagtggagttcccaaatttatagaacaattactactagatctaagaaatgagattgatggcaacacaataatagtgggggacttttatactccactggcagcactagacaggtcatcaagacagaaagtcagaaaagaaacaatggatttaaatgataccctacaacaaatggacctaagagatatttacagaacattctacccaacaactgcagaatatacattctattcatcagcatacagaacattctccaaggtagaccatatgataggccacaaaacaagtctcagtaaattttaaaaaattgaaattacatcaagtactctctcagatcacagtggaataaaattagaaatcaactccaaaaggagccctcaaaataatgcaaatacatggaaattaaatgacctgctgctgaataattgttgggtcaacaatgaaatcaagatggaaatttaaaaattctttgagctgaactataataatgacacaacctatcaaaacctcatggatacagcaaaagcagtgctaggaagatagttcatagtattatatgcctacatcaaaatgtctggaagagcaaaaatacacaatctaaggtcacacctcatggaactggagaaacaagaacaacccaaatccaaacccaaaagaagaaaagaaataacaaagatcagagcagaactaaatgaaattgaaacaaaaaaaaaatacaaaagataagtgggacaaaatgatggttctttgaaaagattaaaaaataaaacctgatagaccaaaattgagataaaccaagaagagagaagatccaaagaagctcaattagaaatgaaacaggagatattacaactgataccacagaaatacaaaagattattcaaggctactatgaacacctttatacacatgaactagaaaacctagaggagatagataaattcctggaaatatgcaaccatctagattaaatcaggaaaatgtagaatccctgaacagaccaataagaagcagtgagattaaaatggtaatttaaaaaattgccaagaaaaaaaagtccaggaccagatatattcagagctgaacgctaccagacattcaaagaagaattggtaccaatcctattgacattattccaaaagacagagaaagaaggaatcctccctaaattattctatgaagccactataccctgataccaaaatcaggaaaagacacacacaaaatataaaactacagaccaatatccctgatgaacatagatgcaaaaatcctcaaaaaatattagcaaactgaatccaatagcatataaaaaagataatccactatgatcaagtgggtttcataccagggatgcaaggatggtttaacatatatatgtcaataaatgtaatacactacataaacagaattaaaaacaacaatcacataatcatctcaataagtgctgaaaaagcatgtgacaaagtacagcatccctttatgattaaaaccctcagcaaaattggcataggagggacatactttaaggtaataaaagctatctatgacaaacccacagccaacattatgctgaacagggaaaagttgaaagcattccccctgagaactagaataagacaaggatgcccactttcacaacttctattcaacatagtacttgaagtctgagccagagcaatcagacaagagaaagaaataaagagcatcaaaatcaataaagagaaatcaaactgttgctgtttgctgatcatatgattgtatacctagaaaaccctaaagattcatccaaaaagctcctagaactggtaaatgaattcaataaagtttcaggatacaaaattaatgcacacaaattagtagctctgctatacaccaacagcaaccaagctgagaatcaaatcaagaactcaacccctttcacaatagctgtaaaacaaacaaacaaacaaacaaaagtcaaaatacttaggactttacctaaccaatgacctaaaatacctctacaaggaaaactacaaaacactgctaaaaaaaaaatcatagacaacacaaacaagtggaaacatatcccatgctcatggataggtagaatcaatattgtggaaatgactgtactgccaaaagcaatctataaattcaatgcaattcccaccaaaataccaccatcattcttcacagaactagaaaaaaactatcctaaaattcataaattttgtgaatttatttatgaatttacaaatcaaaaaaagagcctgcataccaaaagcaagactaagcaaaaagaacaaatctagtggcatcacattacccaatttcaaactatactataaagccatagtcaccaaaacagtatggtactggtataaaaaataggcacatagatcaatggaacagaaaagagaacccagaaataaagccaaatgcttacagccaactgatatttgaaacaaagcaaccaaaaacataaagtggggaaaggacaccctattcaacaagtggtgctgggataattggcaagcaacatgtagaagatgaaactggatcctcatctctcacctcacacaaaaatcaactcaagatggatcaaagacttaaatgtaagacctgaaaccataacgattctagaatataacatctggaaacccttctactcattggcttaggcaaagacttcatgaccaaaaatccaaaagcaaatgcagtaaaaaaacaaaaataaatagttgggacttaattaaactaaaaagctcctgcacagcaaaagaaataattagtggagtaaacaaacaacccacagagtgggagaaaatcttcacaatctgtacatctgacagaggactaatatccagaatctacaaagaactcaaacaaataagcaaggaaaaaacaaataatcccatcaaaaagtgggctaaggacatgaatagaaaattctcaaaagaagatatgcaaatggccaacaaacatatggaagaatgctcaacatcactaattatcagggaaatgcaaattgaaaccacaatgtgataccacctcactcctgcaagaatggccttcataaaaaaataatagacgttggcatggatgtggtgaaaagagaacacttttacaccgttagtaggaatgtaaaccagtacaaccactatagaaaacagtgtggaggttccttaaataactaaaagtagatctactctttgatccagcaatcccactgctgggtatctacccagaggaaaaatagtcactatacaaaaatgatacttgcacatgcatgtttatagcagcacaatttgcaattgcaaaaacatggaatcagcccaaatgcccatcaatcaatgaatgaataaagaaaatgtggtatatgtataccatggaatactactcagccataaaaaggaacatttgcagcaacctggatagaattagattctaagtgaagtatctcaggagtggaaaaccaaacatcatatgttctcattcatatgtgggagctaagctgtgaggacacaaaggcataagaataacacattggattttggggatttgggagaaagggttggggatggtgaggaatagaggactacacattgcatacagtgtacactgcttgggtgatgggtgaaccaaaatctcagaaatcaccactgaataacttatttatgtaatcaaacaccacttgtttccccaaaacctattgaaattaaaaaataaaaaataaacctctcattcattgctagtggatatgcaaaatgttacagctactttaaagacagtttgtcagtttcttacaaagctaaacatagtcttaccataaaattttgaaattatgctacttagtatttaccccaatgagctgaaaacttgtgtccacacaaaaacctgcatatgaatgatgacggcagctttttgcataattgccctaaattggaagcaacacagatgtccttcaataggtgtatggataaacaaactagtacacccatagaatggattattattcaagccatgaaaaatgatggagaaacttttaatacgttgactaagtgaaagaagccagtttgaaaagaccatacgattccaactatatgatgatttgaaaaagacaaaactatggagacacagtgattttcagagtttcagggagagagaaaagggataaatacgtaaagcacagggaattattagggcagagaatctattctgtatggtaatgtaatggcagatacattacagtgacattatccatttgttcaaacccatagaatattacagcacagagaatgaaccttaatgtatacaaattaaaaaaaaaaaccatttgggtatcgaagtctctctcgattcccttggtggagtgtttggcctgctcagggcattctctagatggttcttagggcagctgcctctgctttggcccacccagacttactgagtctgtcattgagcatcatcttgctgcctggggtcattaacagttcagctttagctatattttctagtccagttatccattctggggtagctgggcacatttctggattctagtatgtaaggcatctcatattgagtgggatggagagggtgcagagaagtatcactgggttgtgtgaaggtaggaactggagctggaaagccactgggattgtgacttttattacaccaatagcccagtgagaagacatacaggtatatcaatgtagacatgctgagagcacccagtcagtgaactcttgcctattgtactgtacatgtgaagtgtgatggaaacctggtactgtggccatcaatcatatagctgctagtaactgaaggtggaaggccttaatacatgtgttgcctgcaataagtgtctttagcacaaacttaatctcccctgcagttctggcatatgtgtggaaaaggagtttggtggttgtgggggcacaaatctctctcctaggacagaggaggaggagtacagacgttcatcagacaatcaaggcaagactcaaggagtgaataggaaaaaagtacttaaggaagttttacaagctgtgtttgttaaatatttgtgaatcagggtcttttgggaattagaaagagagccaatcaaggtgatatggttttgctgtgtccccacctaaatctcatcttaaattgtagatcctataattcccatgtgttgtgggagggaccatagggagaattgaatcatgggggcagtttccccatactgttcttgtggtagtgaataagtctcaggagatatgatggtttgataaggggaaaccccttttgcttggttctgattctgtctcttgcctgccatcatgtaagaactgtgagtctactaagccacgtggaactgtgagtccattaaacctctattgctttataaattacccagtcttggatatgtctttatcagcagtgtgaaaacggaaattggtatcagatagtagggtgctgctttaaagatacaaaaaaatgtggaagtgactttggaactgggtaacaggcagaggttggaacagtttggaagacttagaagaagtcaggaaaatgtgggaaagtttggaacttcctagagacttgttgagtggctttgaccaaaatgctgatagtgatatggacaataaaatccaggctgaggtggtctcagatggagatgaggagcttgtggactggagcaaaggtgactcttgctgtgtttcagcaaagagactggtggcattttcccctgccctaaagatttgtggaactttgaactttagggagatgatttagggtgtctggtggaagaaatttctaaacagcaaagcattcaggaggtgatttgggtactgttaagagcattcagttttaaaagggacacagagcataaaagtttagaaattttgcagcctgatgatgtgatagaaaagaaaaacccattttctgaggagaaattcaaacctgctgcagaaatttgcataactaacaaggagccaaatgttaattcccaagacaatggggaaaatgtctccagcgcatgtcagagacctgcaaagcagcccctcccatcacaggcctggaggcctaggaggaaaaaatggtttcatgggcctggcccacccaccagtgttcccctgctgcatgcagcctagggattcggtgacccgcataccagccactcccgccatggctaaaaggggccaaggtatagcttgagtcatggcttcagagggtgtaagccccaagctttggcagcttccacatggtgttgggcctgtgggtgcacagaagtcaagaactgaggtttaggaaccactacctagattatagaaaatgtatgaaaatgactggatgtccaaacagaagttttctgcaggggtggggcccttgtggggaaactctgctagggcagtgtggaaggcaaatgtggtgttgaagcctccacatggagtccccactggggcattgcctaccagagctgtgagaagaggaccaccatcctccagaccccagaatgatagatccactgacagcatgcactgtgtgcctggaaaatccacagacacttgacaccagcccttgaaagcagccaggagggaggctgtaccctccaaagccacaggggtggagctacatgaggccatgggagcccacttcttacatcagcatgacctggatgtgagatctggagccaaaagagatcgttttggagctttaagatttgatggatttcagacttgcatggagcctgtagtctcttcgttttggccaatttctcccatttggaatgagtgtatttatcaaatgcctgtaccctcattgtatctaggaagtaactaacttgcttttgatttataggctgataggcagaagggacttgccttgtctcagatgagactttggactgtggacttctgagttaatgctgaaatgagttaaaactttggggggcggttggcaaggtatgattggttttgaaatgtgaaaacatgagatttgggaggggccaggggtagaatgatatggtttggctctgtccccacccaaatctcatcttgaattatagttcccataattcccatgtgttatgggagggactcagtgggagttaattaaatcgtgggggcagttttcctcatactattctcatggtagtgaataagtctcaggagatctgatggtttgataaggggaaaccccttttgcttggttctttcttgcctgccaccttggttctctcttgcctgccgccatgtaagacatgccttttgccttccgccataattgtgaggcctccccagccacgtggaactgtgaatctattaaatttctttttctttataaattacccagtcttgggtatgtctttatcagcagtgtgaaaatagactaatacacaagctatcttaagaactggagagcatgcctctcatagttgctgggtattcatccactaactgatggactagctcagggagtggatatccacccactaacttaggagtccccaaaccccagggcatagactagtatcagtttgtggcctgttaggaagtgggccacagtgcaggaggtgagcagcaggtgagtgagcattactgcctgaactccacctcctgtcagatcagtagtaacattagattctcataggattgcaaaccctattgtgaactgcgcaagcaagggatttaggttgtgcactccttatgagaatctaactaaactctgaccatcccccttcccccacccctggtgtgtggaaaaattatattatatgaaactggtctctggtgtccaaaaggttggagattgcagcactagctcatatccctcactgagtaaggctctcagctgggatatcagctccaacacttcctgcttgcttgctatggtctgatttcacgtgttccccccaaattcatgtgttggaagttttttcctcaatgcaacagtgttggaaggtggggccaaatgggaggtgttcaagtcatgagggttctgccctcacggatagattaatgcctctacagaaagggcttgctggagtggatttgctctcttctgctcttctgccatgtgaggatgcagcaagaaggccctcaccagatgccagaaacttgatcttggaaactttccagcctctggaactgtgaggaaataaattcctgttctttataaattgcccagtctgtggtattttgttatagcagtacaaaacagactaagacactgcttaagcccagcctgttcctgtgactagagagagctctcaggctggtaaccctgaagccttccctgagtgcaggttacctgcaggcaggctgaggggcacgggtggcaccaacagtagccaccactttagaatttttgtcttgagctgagtgagaagagcagggaaggtgagttgagctgaatcattcctggggcaggtctgcaagcagattgtccaaggctccttattgaggcctttgttgttgagccattccttcgtgttagtgaggtctccatgcctcttctaaaaacatacttacttttctccctaaattacttaaaattagtttgttcctttacactttcagagtgaactgacacactattctagccaactctagctcaggagggatgagacagaagagttgggaagatcttttcctcttccacctctttctgtggtttctcacctcactgattctgcagcccctagaacgctgcacggctggtacttagctgaaggaggtcacatcctggtgaaagggaagagatcctttaaggggatatgccatgtggcaccatgttgctggttcccaagcattggatgggcttgctcactcccttggatattctgacacagagcttcagacatggcagggccagggtctctgggattttccaaaagaactttgagatttaataaaatacctcttttaaagttgtttttaatggagctcttatgatggattttgtgcagaactagaaaaacaggagttagtcagtctcacagagctgaattaggaagtacctgagataaaaatgtgaagtggggagaaatttgtgtccatagcatccttttttctcttttcatgtgagcagttggactaggtgacatctaaggtgttgattttcaaaagctggttcatagagggatgtctgtccatgatgacaataccattatcttagtttgggctgctataacaaaaataccatagactaggtggcttaaacaaaagaaatttatttcttgcacttctggaggctagaagtctgagctcagggtgccagcatggttggattctggacagggctctcttcctggtttgcaggtggctgtgttctcatatgaaagagaaagagaggaagcaagctctttccattctgttctcacaagggcactaatctcatcacaaaggcttgaccctcatgatctagctaccgcccaaaggtcccatctccaaataccatcacattgagcattagggtttcctacatatgaatttgaagagggacacaaacattcaatccatgggactggtcctttataatgagaataaaaaggaggatgcactgagtcttacataaaacaaaatatattcaattatttttaatggaataattaccttaataactattttgtaaaaaattagtttgcaactctaagctatttttacaatttttttttaatttactgataacatcaatcactcaaattaggatgacttgaggacggtttaataaagagactatttacaaagacatgctaggggtgggaaaagccacaagagatagtacattaccctgggactagaaagctgggccctgttatcaacacttggcctgagtggtaaagggaagagaagtttctggaaattgaaaggagagagtcttgtggagatggccaccctaagggaagcccttgattatccatagaaagacatcaccagcctgcggagaccttgcagggagggagcctaggagtaattactccaacacctgcctctccttccctctaagctgttgctgagtagccttgctggccaaacacagcaaaaagacagaggccaagggaactgttggatgtggtccacaaaggttgacctcctggggcaaagatcatggaagagaagtggtatggactgactgtgtcaccacaaaattcgtatgttgagatcctcaaccccaatgcgatggcattagaagactgggcctttaggaagtaattaggtcatgagggtggagctgttagaaatgggattagagcccttgtaaaagggaccccacaggccaggcatggtggctcacacctgtaatcccagcactttgggaggccgaggcaggcagatcacaaggtcaagagacagagaccatcctggccaacatggcgaaaccccgtctctactaaaaatacaaaaattaactgggcatggtggtgcacacctgtagtcccagctacttgggaggctgacatgagaattgcttgaacctgggagggggaggttgtagtgagccaaaaatcatgccatttcactgaagcctggtgacagagtgagactcatctcaaaaaaaaaaaaaaaaaaaaaaaaaaaaaagggaccccagagagctgtctcaccctctttctgccgtgtgcaaacaacaagaagttgccatctatgaaccaggaagagggcctttgccagacaccgaatctgccaatgccttgatctcgtacttctcagcctccagaactgagaaataaatgtttgttgtttaagccacctaaactatggcatttttgttgttgcagcagcaactaagaaaagaaaggtctagaaggcatcaaacagaaggcatctgcagagtccattcttttgcctctcaacatcccttctcctcatctgggaaaaaattcacagaatatacaaagtcccatcagaaactacatcattatgagataatatcaatgaggttacactcccaggagaaatctgaaatgttagccactactggtgtctcaatttccaattcagtagaaacaatactgcatttctagaataatcattcttcctttgagtgtttctaaatctgcccaagaacatggtaacaggaagcaaaagttcttcaagtaggatagtagaagtaacagtaagagggaccattcttggacttttgcttgctggctatagcagagagaacactacatttggatgctggctgaaggcatgttgtttagggcaacaccccaattgcataaagggttggctcccaagctggtgccattcctgagtcttcagcaggtcattccagcacacatcaagccagcctctgggtgatgggatgcatggaaagactagtgaattcgatgtgtgtgggcccgttgccgcagcctctttgcagtaaaatgtttcctgagcagaagcaacattgtgtgggaaaccatggcaatggattgtgcgttttctaagtccaagaacagtagctctggcagacgcgctgctggcagggaggatacatccctaactgcaatatgtgtgtgtccctgtgaggacaaagtgctgttcctgccatgatggagggggccaatgtattcaatttgtcaccagatagctgactgctgccatatttattatagcactggtggaagccgagcagaagacagagggtaaagttgctggttgatgccgctcacacatgccaaccttctggtggaaagccgaatgcagagaggaggagagccacacattggttcaggaaacccccaaatttagggctcctgctctgagacctccacaagtttatgacgtttttaaactttcaggcccttgtggttgcctcttctccctctgtcaaaacggagcccttttgaggatctcttccatcttggtggggatgtagggagccccttgctctttctggaagagtttgcattttagctttaccacttaaagtgttactgcctgaagtctggctcattcctttgtggccacaaagttggacccttgggagcagagagtgttatttgatttgacatcatcttgactcttgaaaaccacacacacctggggttgctggtcacagagacattttggggaagactgatttgcagcaattctcagctaattttcataaaataagcaaaggagaaagaacgtggcttcagggtcagaaaatactgggtttaagtcaaggctttgctttgagaggttctaaagggtatgactttggggaagttgcaaactcttggggagattcaactttcctcttctgtaagctaggaaccagagtgactatccctcagggctttgaggaagttaaatatgttgtgcaggttgtaacacaatgaggttccagggagtggtaataatgcaccaagaggatttggtcccacacgctgcctgtgatccaccaggcccccagtaatctctgcatcaccccctgccccatcaccaatccacagagtcaatagtcatgtattttgctagggggtctcaagttctgagcctcaaagaggaagttgagcattacaaaaatagaggtgttatatggataaagctgtagctttctacctgtaaaacccaccacatcaatctgtgaagatgcggttcattattctcaggatgatgcaattagtcttaatgacctggcaggcgcttgtgagcaatgattcttaataaagctttcagggctagggtgaaaaccacccactgcttgtgtctattcatctcactcccaagctcggccatgcatactcagtttgaatatgtgcttcctaaatccattttaaggggaattgtttagtgatttactatcataggcatcctggcttatagctaagagatgggcttgcctctttcagcaagaaaaacaggccaagatgaagatcaaaggcaaagaactggtgttcctcaggaataaagactggtggcttgaactgagccatctttgtgcatcacccactgagtttaataatgtaccaagaggactggttttgtgtcctatccaaggggtacacgactgcaaactggcttgttcatgaacctctttccagctggcacagcctcatggagagctgtttatctgaatatttataatacttatagtagattaataattgttatattcctgttcaacagccatccttgactttcttccttgctagccgaaggatacctcctactctgaaacagactggattctagctttcccagacatgctttcagctaagacatgagcacgtgaccaatcttgaccaaaaaaactagaggggaagtcagttaagggctcatggaaagggttttcttctatattaaaagagtaacacagtggaggaacatactgtatctgtgtttggacagcatatatgagaatgcaatgtcagaaatctagtgaccaagagagcaaagctgagagaatcacagagaaaccacatcagtttagttagtgaactaatgggccctgaagctgcccacctctgaactttctattttatgagatcatcagtgccctttattgcaggtactttcaggtgatggttgcagacacagttgtttacctatgcaaacatattcctccatattccttgctaaaggaatcctaattcaattaatctggggggagatcctctacccttgagggagatgggctcagcctttatgctactggcagggcctgggggggcgcatataaaccatcctggacgcagggatgtaaagggaagccttctggaggaccctggggaagactcttctgccctaataagagataactctgtgagcataaaggttctgcctgactcttcccctttgaaaacagcatatgaggacaagttgctgaggacgtggctgctttcttaggatcagaagaagatgaaaagaaaactatagaggaggcatctttctttgagctgatccctgaaacaattgcatgtaggattttaaataaaagccatttagtaatatttaatttttagccatgggtggacattttcctgctgaagggattttgaagtgttcaagcttagacccaaggccctggcaggggttggcagaggtagattttaagagtgatgccgatttgttttccagtctaaaaaaaggggggctgcctatcatatctttagagagcaagcgggaattggactggaccaaaatatgcagtcaagtgagagaagtggccctttgattaggggctttttaaggctccgaatccccaggcagcctgggactgtgatctggccatgagatgtgggacagggaaggggagatgccccagatgggaaaatctagggctgtggaccttgccctcctgaagtgaccaagccacgaagacaggggcttcagcacagccgaggctggggtctggacacctagtgacctggggctgcatcgtgagtggtgggagaggggaggcagctgttgcccccacaaaaggctggatacggctacttttggaaagcagaaggggaaaaatagaggtacatttcagtaatttgctggtgaaggaagtcagtgactgttttatcacccaggtccacagccctgtattgtaccaccaggatgatgtggcttgggaaaatgatagatgctcatgtttacccccatctcaccagatattaggttggtgcaaaagctattgcggtttttgtaatagtttttaagcaccttgaaagcaccgatggtttgttacattcctctgatgttcctgtgcaagcatcaaatagttgatatttaaatttaattcaataaatatatgttgagaccatgctgtgccccaggcaccatgccagacactgggatacagcaatggatgtttgcctaaaggaggcttgtgtgacttgatgtaagctaccccataacccttggggctgtacccaaggggggcttctatgctgatctttgtcaaccactagagggcagaagaaggggcccttttcctgagcctgtaacatccccagagggatggcaccgggagtgtgagaccaggctctagagagctgagacctaaaagggaggcagggatgggaagagggctccttgtgattatttctgagtggtgttcttgggggtggttttttttttctcttcccaaggcattctgcaaattggaaaatcactcagtcatgctaattgtgacagcgtgagacctctgtcaaattactgtggtgcctgtgctctggggaacattgccttttgagctgtaaaatgtcttcttttacagtaatgaacatcttttagcagcataagaatgcaccagggggttcccaagaaaatggaataggtggtttctcatgggtaggttgccctaccctcaacttgatctaattataaaatgattggattttccttagataatggagatgatgaggaaaatctacttcatattatgagccagagcttcagactgtggcagtttgttcgtccttgggcaattgtggttgagtagctaattgaacagctttgggctttgagaaatagccatacgcctttatctccttctcaattttctcatccttttatgtttattaacctctaagcatggttgttccatcatgaataagaaaattctgaatctttgttttccttctccagaagggatttctatctgcagtggagtgagcccaagtttaccaccagggactaactggcagagattcctggagcacctgcatgatgtggggggcttgttggcatttgagtcaggaggaagtggagatctgaggcttctcagagtgagcttcaaagagtcagagaaaaggttaaaagtcctgtagtcttatttatgtgagacctcacaactaaggtgaccctttaaacttcccatggaattactggcatgaacaacttgctacattactttggaattatatcctagatattttagaaaaatgtccaagcaatgcacgacattgaaaactgcttatttccaaccattcgttgctcagtcaccaagtgctggccattgcctagatcctgggagaagcggaatgtttgttggttaagagcgtggagttagactacttggttgtggtctgtgtagggtgcagggcaatgggaatatttgagaaaaaccttaagtttatttctacagtcagaaatgtgttcctccattggaaatcacttcatatttttagaggaagtgagagagatgtggaaagtgtagatagaaaattttagtatgattgattgctaaaaaaaattcccccggaaagctatttcaagtagaaaatggtgttatgtggtcaggttggggcaagaaaaaaatgaaatacaccaagattctgaagagagcagaacatgaaagatgagccatgattctttgtagcaatatcacgtgctggaagcgtcctgttgtggtcactttgtcctttgtgttaactccacatccccctgcacttcctgtcccctcccacagttgcccaactcggaagccctcagacaggtctccgtgtctgtcagcagctctgccctcagggctgagtggcaccttgcagcactggctggatcctgagcagttccttcctgtcagctgttggcaaatgctgccttttgagcaggactcaccttcctgcagcgtgggaactgggggtggtgtcaccaactgttggactgtgacaactggcatggctaagagtatagaaagtatctcctaccctgtcctgctctgcccttcaagcccgggcacttcttccattctccattgtccaaggtcaaaggaagggctggttgactctcagcagtgggattccctgcctgcctgggtaccctccccagcccagcttccttctaggaggttggaaacaggccccggcgagcctggtgccatgtcttcatgggagttgcttacgtggtacaccaagcccaggtataagagagggaccagaaatgtcaactgttttctcggtccaggatttctcctttgcaatgcctggaaggatttttttattttattctttactctttctattgagacgtaacatgcataaaatgcctaaaatgcacttaggagtgtacggtccttctacacctgtataaatagcacccagatcaagatttggaatcctactagtattccagaaggttccttattttcctctttcagtcaataactccgcaggcaactaccattctgacctctattttcatcagttagtttttcctgtttttgtcatcgtatgaatggaatcatgccatatatacccttttgtgtctggcttctgtgctactatgaacactcttgtatatccttttgtatagcatggactctttctcttgggtgcatgctaagagtagaatcactgggctataggtccgaatgatgtattttgattatgttaacttaagcatgtgcgagttggcacaacaaataacacagctataaataaaagtagctatgaataaattataagtgagtgccccagctttcaatcaaccacactaccaaatggaagcatattcatgtcatgtcagggaaaggtgatggctactgattgcctggctttgaatctttgctctgccacttccctgctctgccactgggaaaggccacgtcagcccactatgcctgagtttcctcatctgtaaaatgctgatactatggcagtacctatttcctagcagcaggagtgcctatttgacacccagagattatttcaacacgtcctcctctatagaacaaaatgattcaatactaactgcatagtaatacaaaaaataacaaatttctttatgtgttcattagttatgaagaattttttttttgagatggagtctctttctgtcacccaggctggagtgcagtggtgctatctcggctcactgcaagctccgcctcccgggttcaagccattctcctgcctcagcctcccaagtagctgggactacaggtgcccgccaccacacacggctaattttttgtacttttagtagagatggggcttcaccatgttagccaggatggtcttgatctcctgaccttgtgatctgcctgccttggcctcccaagtgctgggattacaggtgtgagccactgcgcccggccaaaaagaattaaaatgcaattttaatagtattattcaagtttggtgaaacactttatgtatgaattaaaattttcacttattaagcaaaatcagtatgccttgtcctttgcattcagttttgctgttttaaatcttaaacacaaaagctccaagtggtcacatgggattggagtgactcaaattttgtcttggtcttcacaatcactgtgctatccatatatatttaaaatcttttgtttatgtgcaggcattggagacacacactgagctccaaggcccaagcacgaggaaggattctgaataattatgaccttactcctggagtgaacctgtcttgctgattctgcatgtgtccgaggccaactctgttattgggaattctccaaattaacttccatgtagaatataatgtttattaatgggaaagtaaagaaaacataccaatttaaagcttacttgtgtataaaatgaagtggtaactacagtaattatttttaacatagtccaacgtttggtaaggagtattttatcactgatgttgtttgaaatttctggttcctggtaataatttaagaaggagatgaacttctcattggttttcttactgacaaggcatctgttgactttctgcactctaggtggagtgttccacttccctcttcctgccactctgctgctccctcaggctgctctgtagttattcacaaatacttgctaagcgcaaccatgcatagggcaacacttccgacaataaggctggggaggggaagtgaacaaagcagattccttgacctcttggagcttatgttctaaggaggggagaagagaaaataaacacctaattgtgtcctatgtcagggagcaacaggtgctctggagactaataatacaggttagggaggacagagaggtggagaggacagtgtcatatggatggtcaggaaaggcctccctgaaaaagtgacctgtgagcagagacctggaggaagtggaggagtgagccaagcagacctccaggtaaacagaggcccaggctgagggggcagggagggccgaggccctgaggagaggctggtgtgtctggaccagggtgaaagcagagaggaggagagggagtcaggaacagagatgggtcaggaggacagggccttgctggcacagtggggttgctgaatgctactctaaggatgatgcagactcattgggggctcctatttgagcagaggaaggacaagctctgaaatgtcttagtggaatcactctgactgcagaatcaaagatagatttatggtaggatggggagcaggcaagggcagctatgggagagcgttcttggcaacaagtcagcaacccaagtgagagatggagatggcttggaccaggcactaatcaggaaggtgggagaagtggtaagattcagggagagtcagctgggctgctggaatatatgtgtgtgtgtgtgtgtgtgtgtgtgtgtgtgtgtgtgtgtgagagagagagagagagagagagagagagagagagcaagagagcagagagagacagcagagaaagacagggacagagagacagaataaatggttaaggatgaccgccataagagctttgggttggtatctggggaatgctggagaggagcaggtttagaaagaaatcacaagctcagtttgacgcacctgatttgaagtgcctattggcatcccagccgggagagatctgggttgaaggtaagaattcagcagttgtcagtgtgtacattgtatttaaagccctgagaccagctgaggtcatcttggaagtgatgagaagaatgaggagcctggggtttgatgaagtgtgtaatggactgagtgtttgtgtacagcacaattcctatgttgaaatcctaacccctgatggggtggcattaggaggtaaggctcttgggaggtgattaggtcatgagaatggggccctcatgaatggggtgagtacccttagaaaagagacccaagagagctctctagctctttctgccatgtgaggatacacaaaaccaggagtctcagcctgcaagaggacccgcaccagagcccagccaacctggcacctgggcctcggactgccagactccagaactgtgagaaatacatttctgctgtttgggtccccactctatggcactttgttaaagcagcctaagatgactaagacaaagagactacccagtagagaattaggaaggtggggagaaaccagtcaatgcaggcaacttagaaggagcagccaggagagcgtgctgtcccggaagccaggaggaaagtacctcatggggaggaaggtgcaatctctgtgctgtatgctctaatgggctgggaaggatagagtggggaactggccaagggacttctgtagatgaaaggtgttaatgtgcctagaacagggcctggccccatgaacactcaatgcaataatcactgccatcacccttattgattaattcattttattgttcttaatattaatgttataacaattaatataaaaatattacttattatttacatgccttgggatatcagagggctgctggctctcaggcagctgattaaaaatctttctacattttaagcaggagagaagaattttgatttttttctttgtggtgattatttccagtttcatgttgcaccctctcactagcccactccactccaagtgcagctgctggtgttgaaagaacttgttttctgcctttctaggatgttgttgtttaacccatttatgtcctgttatgtaaaggcatcgtgtgagcatattctcacgctcttttagttttgtaacgaaggcagtgatgacgcactcaccttggtaaactgccaagtgcacttatatttttgctttttttcctcagccacatcctctcagctctgatttttcccgctagatgaataagttcatttatttgaggatattgactaagctgggaaataatggggaggagaaagtttagccctgtatgtaacccaggtgtcaatgacacgtatcacgcaaatactccaggtgcaatgcccctctgagggtctaagtcccttgtttacattggtggaagttgctcctgatgcctcacaccgacaggtacagagaatggacggccgatggccccttatttctacctgtctggagcagtaggcagaaccatggcatgagggtgtgacccaacattgctgctgttttcttttgaatactacacacttccctgcttggctctgtctattctctccagccagcattctagctgccacctgtgcctggcagcatctccattagtgcactctgaggacaaagaagacagatatagctcatattcacctggagtcctgggacagcctggaggaagatgtgacacctgggctcttgaatatagccctcagagatgaaccataggctgcgtggctaattaaaagttggctgtgatagaacttagttatttgagacagagggacagaaacattgactggtttgaacccagtgttgcaacaaagagaagctctgtgttgtttatctgctcacatgtgcctcctgcacataaaatgaaccttcgaaatgcctggacctctcactaaatgccgcttaatatccaaatacctgctagacatcccaacttggatgttaaataatcatctcaaagcagagacatctttgtctcattatgttcaggcttctgtaaaaaaataccatagcctgggtggcttataagcaacagaaatttatttctcacagttctggaggctgggaagttgaagatcaaggtgctggtaaatttggtgtctggtgaggggccccttccttgttcatagctggtgccttcttgccgtatctttacatggctgagggagctctccagggcctcttttttttttttttttttttgagacggagtctcgctctgtcgcccaggctggagtgcagtggcgggatctcggctcactgcaagctccgcctcccgggttcacgccattctcctgcctcagcctcccaagtagctgggactacaggcgcccgccactacgcccggctaatttttttttgtatttttagtagagacggggtttcaccgttttagccgggatggtctcgatctcctgacctcgtgatccgcccgcctcggcctcccaaagtgctgggattacaggcgtgagccaccgcgcccggcccagggcctcttttatgagggcactgatctcattcatgagagctccgacctcatagcccaatcacctctgaaaggcctcacctccaaatactatcacatgggggattatgtttcaacatataaattttgaagggaatgtaaatatttagtcaataacaatgtctgaaaccaaacttgtgatctcccctacccccaaaactctctttctgcaggaatccctggctcagtaaatggcaatgtcatcttttcattagcaaatacaccaaaccttggagtcaaattttgactcctttatcatttttctatcccacaaaataaatccataatccaatcatttctcaagaccccctcttactcctgggtctgggctgcctttctctctcatctggaacttttggtggaatgatgactgctcttctagcttccacccttgtgactatcccccaccgcccaccacagtctattcttagaatcaggagttagtcctcccaatataacaggtcatactcattccctgctcagaactctctggtaactcccatctcactcagacagcatcaaaagtcctcagcctggcctcaaggccctgcaccatctgacccccttactccctacccttgttctcttcccctttcccctctggctgccctcgcctctttagtattcctggagaatgtcaagcacatccagccttgggacctctgctcctgccactcctttctgggggagttcctccccagtattcccatggctcactccctctcttccagtgccatcttctcagtaaggacttcccttactacccagtgtaaaatccagcctcccaccccccttctcctcaccacctgcactcctttcatctccctgctttattttcctctgtgggacttatactcatctgacattctgtagcatagagcaaaatgattaacagcaggggtccccaactgccaggccacggaccagttccagttgtggcctgttaggaaacagggtgcacagcaggaggtgagaggtgggcaagcaagcaaaccttcatctgtatttatgccactccccattgcttgcattaccacctgagctccacctcctgccagatcagcagcagcattagattctcataggaacacaaaccctattgtgaactgcacatgtgatgaatctaggttgtgttctccttatgagaatctaatgcctgatgatctgagatggagctgaggcagtgatgctagagccaggtgtggctgcaaatacagataaacattagcagggaggtttggctgcacagagtccataataaatcaattgcttgcagattcatatcaaaaccctatcaatgagtgacaagtgacaattaagctgcatctggtggcaggctttatagtggcaggtgagttgatatacttgaaatgtacagttgcatctagtggcaggctttaagtcagaattcgatgttaattttagtctgcatgtggcccgcccattattttacttaccacttccatctgcgcctctttcctgcactgtgcacttgtctcagtcatagttttggcaagctcaaagcaaactctagccgaaatgagtaaaatacagacatcattggagagcttcttcgtagagggggaaatacccagtgatgagacagcagaagactctaagactgccaacaaaaagaaagctgcatttgaaagaaaataccaagtcttacttaaattataggctcaaggcaacagatgatcacattctccaagctcactttgtataatatgtggtgaccagctatccaacgaagccatgaaaccttcaaaactgcttcaccacatggagaccacgaaccctgcattaaaagacaagcctttggagttaaaaaaattcgaacatgaagaacagaagcaattattgaaggccaccacttcatcaactgtgtctgcactgagaccatcattcttagtggccaaccacattgctaaagctaagaagccctttactattggtgaatagttgatcctgcctgctgctaaggacatgtgttgtgaacttttaggagaggctgcagttcaaaaagtggcacgcgttcctctttcagctagcaccataactagaagaattgatgaagatattgaggcacaattgttagagaagattaatgagtcaccatggtatgcaatccaggttgatgagtctaccgatgttgacaacaaggcaacaatgcttgcttttgtgcaatatatttttcaggaggttgtgcatgaggatatgttatgtgcacttttcttgccaaccaacaccacagctgcagaacttttgaagtctttgaatgattacatgtgaggaaaactgaattggtcattttgtgttggtttatgcacaaacagagcagctcccatgactggatggctttctggtttcactactcgagtcaaagagatcgcttctgaatgtgagtttatgcactgtgtcatccatagagaaacgctcgctagccaaaaaatatcacccgaactttataaagttttgcaggatgtgattaaaattatcagccacattaaaatacatgcccttaactcacatctactcacacagctctgtgaggagatggacgcagagcacatacatattcttttgtacctagaagtgagatggctttttaaaggtagatcaccacccagagttttcgagttacgggagctgctccagagatttcttttacaaaaacggtcaccactggcagcacatttcactgacacagaatgggtcacaaaacttgcttagtggtgtgaagtattcaacctgctcaatgaactcaatctgtcacttcaggggagaatgacagctgtgttccagtcagcagataaagtggttgccttcaaagccaaactggaattatgggggtgatgaatgaaccttgtgatttctgacatgtttcaaacattagcagagattttgaaagagagtaagccagggcttctttctcccagctgatgcatgatcacctatctcagctttcaaaagagctagagcattagtacccaaccgcaaaggaccccaaactgggaaggaatggatccgtgacccatttgtgaataagccaggggaattgactttgtccgtgacggaagagggtgaactgcttgtgattgcaaatgatggtggccttaaaagtatgtttgagaaaacttcaaatctccatacgttcttgattaaagtcaaggcaaaatatcccgagatggccacaaaagcactgaaaaccttgcttccatttccaacatcctatctttgggaatcaggattttcttcagtgaatgcagacactttgggggtcactgtctccatcacccccagatgggactgtctagttgcaggaaaacaagctcagggctcccgctgattttacattatggtgagttgtataattacttcattatatattacaatgtaataataatagaaataaagtgcacaataaatgtaatgcacttgaatcatcccgaaacctgaaatcatcccctaccccactagtccatggagagattgtcttcctcaaaaccggtccctggtgcccaaaatgttggggaccactgattaacagcatggaccctgggggtaaaccagtgcagtgtctgagtgaccttgggacagtggcttaacaatctgtgcctcaatttcctcatttgtaaaatggagatactagtagtgcctgcctcattgtgaattgacagatgtaaatagtgttatgtaagtattgagtgacattattatatctgtatggtctattcctactcattagagtataaaatactctcatgagggcagataagtttgtctgttttgttcatgactgaattcataatgcctaaaataatgcctgttacttagtaggtgctcattaatatgtggggaatgaatgaacgataaaaaataagaagtacgcagtcccttctctgttactttgaaaataaaagtctacttttatggtgtgtttttcatgcttttaaaaactccaagtaatagaatagaacattctaattaaaactcaaaacaattcagagaaatgcacaatacacgtatgtttattgtagtgatagactggataaagaaaatgtggcacatatacaccatggaatactatgcagccacaaaaaagaatgagttcatgtcctttgcagggacatggatgaagctggaaaccatgattctcagcaaactaacacaggaacagaaaaccaaataccacatattctcgctcgtaagtgggagttgagcaatgagaatacatggacacagggaggggaacattacacactggggcctgttgggggagtgggggactaggggagggatagcattaggagaaatacctaatgtagatgacgggttgatgggtgcagcaaaccaccatggcacgtgaatacctatgtagcaaacgtgcacgttctgaacacgtatcccagaaattaaagtataataaaaaaatagtatagctgggcatggtgatgtacagctgtggttgagctatttgggaggctgaggtgagaggattccttgagatcaggaggtcaagactgcagtgaactatgattgcactgctgcactccagcctggacaacagagtgacaccctgtctcaaaaacaaacaaaaaaagtaaaggctgtttttatgctctccccatccttttcccagaggtactttctgttaagtttgctatcatttttgagactttttatttaattacatatgtcataaatgaattttgtccattttagtctttgtgtagtcaaatagatcaattatttccttcatggcactggagatttgtgtcttgcataagaagatccttatagtctttatattctcatttttagaacatttttgaaattgagtgcttttggagtttttcctctttatcttatagtaatgtttctcttgtaacttccatcttgttgtctgtcacttctttattttgactggagaacatctgataaagatagtcagtcagtaggccaggagtggtgactcacgcctgtaatcccagcactttgggaggccgaggtgggtggataacgaggtcaggagatcgagttcatcctggctaacacggtgaaaccccgtctctactgaaaatacaaaaaattagccaggcgtggtggtgggtgcttgtagtcccagctactcgggaggctgaggcaggagaatggcatgaacctgggaggcagagcttgcagtgagctgagattgtgccactgcactccagcctgggcaacagagcgaacccatctcaaaaaaaaaaaaaaaaaatagttactcagtaaatagaaacattggtctgcaacatgggttatctgctcacatgtactgtcttttgtggggtgagtgtgcagttattgaagtaaatggtcatctcttcctcacacataaaccttatatcagctaagcccttctgacctttcaaacatgtgtaaaatttccttgaatctcaaatccatggcttgctgaagtccaagcctaccctaagatgtctgtgagttccaggcatgctcaatgctgatgacctccctggtctggagtcaattgctttgttgcataaagtatttttcctctatgtgtttttccagatgagaaactcaatctctagttcagtttaaaagttatcttcaagcaaaatactctgaggtgttactaaagatctggaaagagattgtctagtggatcacataagaaccaacttgatccttcatatattaatccctttttttataagtctttgtaaaaaaagttgggttttgttttgtttagttttgttttgagacagagtcttgctcttgtcacccaggctggagcgcaatggtgtgatctcagctcactgcaacctctgcctactgggttcaagcgattcttctgcctcagcctcctgaggagctaggattactggcaactgccaccacggccggctaatttttttgtatttttagtagagacagggtttcaccatgttggccaggctccaggctggtctcgaactcctgacctcaggtgatccatccgcctcggcctcccaaagtgctgggattataggcgtgagccaccatgcctggcctgttttttatccttactgtattttccaatgaacttttactttcatgatcaggaaaaaaagatttaaaaaaatagggaaaaagtagcacaatcccttatcatcattttgaacctatcctctctccttatggcacacagagcattccactgtgaattagagttgagcctcaatccagattcctcttcaggctggatttgggctccttaatggtggagcctgagtcttggttctttctgacccctgccttgttacacacttggaatctgacgcacacttgctgagttgaactgcagtgcactgcccaggtctgacgtgaagggccacagcaggaacagaaatggagagacaaaaaaagagcagagaagtctctaaagaaggcgatgtgcatgcaggacgtggagtgttctgctttaccttgctgtgcctctctttattcatctgtgacatgggagcaataatagtacctccttatggcactgaagtcaagattacttgagttcactgtaagttagctgtaattgtaatttgttctaactactcgatgctctctctcaaatgctgcttcccccgtcagtcccaccgtgggggactatgctctgtgactgtgtaactgaggctgtgtctggcctctcaattctccccacattctaccttttatctgcttcattgcaaacttctttttttttaatttttttttttttattatactttaagttttagggtacatgtgcacattgtgcaggttagttacatatgtatacatgtgccatgctggtgcactgcacccactaacgtgtcatctagcattaggtatatctcccaatgctatccctcccccctcccccgaccccaccacagtccccagagtgtgatattccccttcctgtgtccatgtgatctcattgttcaattcccacctatgagtgagaatatgtggtgtttggttttttgttcttgcgatagtttactgagaatgatggtttccaatttcatccatgtccctacaaaggacatgaactcatcattttttatggctgcatagtattccatggtgtatatgtgccacattttcttaatccagtctatcattgttggacatttgggttggttccaagtctttgctattgtgaataatgccgcaataaacatacgtgtgcatgtgtctttatagcagcatgatttatagtcctttgggtatatacccagtaatggaatggctgggtcaaatggtatttctagttctagatccctgaggaatcgccacactgacttccacaatagtttccagtcccaccaacagtgtaaaagtgttcctatttctccacatcctctccagcacctgttgtttcctgactttttaatgattgccattctaactggtgtgagatgatatctcatagtggttttgatttgcatttctctgatggccagtgatgatgagcattttttcatgtgttttttggctgcataaatgtcttcttttgagaagtgtctgttcatgtccttcgcccactttttgatggggttgtttgtttttttcttgtaaatttgtttgagttcattgtagattctgtaggaagaatcaatatcgtgaaaatggccatactgcccaaggtaatttacagattcaatgccatccccatcaagctaccaatgactttcttcacagaattggaaaaaactactttaaagttcatatggaaccaaaaaagagcccacatcgccaagtcaatcctaagccaaaagaacaaagctggaggcatcacactacctgacttcaaactatactacaaggctacagtaaccaaaacagcatggtactggtaccaaaacagagatatagatcaatggaacagaacagagccctcagaaataatgccgcatatctacaactatctgatctttgacaaacctgagaaaaacaagcaatggggaaaggattccctatttaataaatggtgctgggaaaactggctagccatatgtagaaagctgaaactggatcccttccttacaccttatacaaaaatcaattcaagatggattaaagatttaaacgttagacctaaaaccataaaaaccctagaagaaaacctaggcattaccattcaggacataggcgtgggcaaggacttcatgtccaaaacaccaaaagcaatggcaacaaaagccaaaattgacaaatgggatctaattaaactaaagagcttctgcacagcaaaagaaactaccatcagagtgaacaggcaacctacaacatgggagaaaattttcgcaacctactcattgcaaacttctttaccctctgggatgacaaatcctctgaagttaagcatttattaaactttatatttccttcaatacatttcacctggtaggtactaaataaaacatatttaattaactttaaaataatgtgtttatttctcttcccaggtgccctgactcatttttctttttaaatcatagtttttgttaaactccaatgtaaatgtcctctgctttttatggagccaattcctgaagaaacgcacccttggcttcatcctgcctttgggaatgaagccaaggatgcctttctctaggaattggaaagacaggctttgagaatggaaggagaggtcatgggtgccagcacacggcagtgtagtagtaaagacatacttcaacccaggtcccctgtctgctgtgccccagaaacttcaaggttgacaggaaggggtacacttcttatttcccatttccagtcctgtgtgggtggataacccttgtgtgtgcacagctcctgggcatcctgcaatgttccagtggatgaatatttatttatcattacatttatccacagttccaggcggctcagtcaccctcaccccagttccttggcaggtaggcgactgaagccagtttttgaattattcatagttctagggttctattcatgtttgtctcagagtaagagtgaggaagacacccacgctgcatctcacagccagagagaatcagtggccattccttagggaccagagctcgaccctggtaaatataaatcaccatttgggaggtgttctgaaacatggggctggccccaagttcgcattctgtctacagaagccacttgctgggttgcattagttaatgagttaaccctattaactcacttggtctgaagggtgtccgatggcaaagggagaagccagtgtgctgccacctggaccttcgttctcccctgaggggccaggtgagaactcatgtggaaatgactgctggcatttttcaggtataaacgctcatcagacataagcagttgcagcactgaggtaggagcctcaggagaaagcttcctgtttaatctgcaaataaagctttctgggtttgacgggggctggcccttgcttggtaatgatagtggagcatgtgtcttctggcttatggctcacaggccgcctttgcctgcccctcttcaaaagagggaggatgctagcagcagggctcagaagtgattttttaaattaaaaccttatttatatgtcctccagaacaatccaaccccttcaggaggagacacaatgctctctgttttgctggtgaggcagaagaaacaaaaccacattatgtacaatatccctgaagccaaattacaatgtttacctccacatgttaacttgacgtgcataattatctgtgcttagaacagaaaatggaagagagggttcaatgaacagccacctgtgcattgtgagtaatgttattccaacagaaacaaaatttgagggggagcatttagggaggagagaagggaaggtggtattggaactgccttaagagaagaaggagagagggggagttgctgttgtgtgggtgagacttcaaagacatggcctggcacatgggggctcccttgtccatcccattggtgatgggacatcactgaacaactgcatcatcgtttccccctctgaactagcattggtgtccctagcgatctcctatcaaggatcaggatagaatagcttcaacacagtgagacaagctcagcaagcattcagcatcctatggcaaagaattaagtttaattctgtgcaaggcaccaccacagcctttacgactggctcaagttcagttgggctgggctgtgcccattgcagcacagatgcagtgctttacctgcatgccctcccatcctgatgggctttcattcccagcagccagcacctgtgcctctctcatggtaggctactcccagtggtcaaaggcacaaagagaccccagaaggccctggggatttaactcctccaggggctttcttgaccaacaactgataggtataggggtgtaaatagtccagctctcttacctggctgtccccccgcccctccaacatgtacaacttagacagctctgatgcctctcctgagctccccaatgggactgagccaaagtccctccatgggactttgctggataccacacagtggcttcctgatcccactttctattcccctaccagtttttccaaggacacttctgatatggtttggctgcgtccttaccctaatctcatcttgaattgtagcttccataattcccacgtgctgtgggaggaaaccagggaccgggtggaagataactgaatcatgggggcaggttttcccatgctattctcatgatagtcaataagtctcatgagatctgatggttttataaaggggtgtttccctgcacaagttctcttgtctgcctccatgtgagatgtgtcttatgccttccaccataattgggaggcctccttaaccatgtggatctgtgagtccattaaacctctttcttttgtaaattgcacagtcttgggtatgtctttatcagcagcatgaaaacaggctactacaacttcctagaaaatcacttaaacataaacccatggaccactgatgatgggttgagaaacattcccacgggcagaaacacaagactctactgctctggccacagctgattggaacaaggatgagggttagacccaaagcagccaacaatagatgactggctgaggtctgcctaatggtcctgatcttagatgttagctggttaccccaatcatatcccctcttactcaattgaaattggagctacacaattatttggtgaccccaggaaaaacagaagtagcaatggaaagcagttgtctcatgaaaatcgtgaagcattagactagggagccattggttagtggagaatggacaagctttaaaccatctgagcttatttcagcctgaatagcctcattcctgcatgtccttgcaagatgctgaagactggctgtgtggatctggaatcattctgtgtcctcttttctttgtacatttcacataactctcccttccccccaactaacagggctgtgttccttatgacctaaaaaagctcaacaggtacaaagaagaatatgaagaaacaatcctcacataattctagagcccagaaatagcactatagaacctgctaacattcattaaaaacttatatacctattcatgaatatattttacgaaatgggggttacataatatatatcatgggcattttcccttgccctaaaatactctttaagtacataactgaccatacttttttctttttttgatatgaagttttactcttgttgcccaggctggagtgcaatgacgtgatcttggctcactgcaacctccgcctcccaggttcaagctattcttctgcctcagcctcctgagtagctgggattacaggcacccgccaccataccctgctaatttttggtattttttttagtagagacggggtttcactatgttggccaggctggtcttgaacttctgacctcaggcaatccacccgcctcggcctcccaaaatgctgggattacaggggtgagccacccgaccataactgaccatatttttatataaccctaatgttcatctctgcatcgtagaattactggctgtggggaattcatggatttctcacaatccctaatatggctgagtctgtggttccacatttggctgcacactggcattccaggggaccttcagagagtactaatgtggagtcccacctccagagactgtggtttgaatggtctagggttggccaggggcttggaattttcagattttaaggagaactcatgggaaactattaagtgagacttggccaggtgcggtggctcatgcctataataccagcactttgggaggccaaggtgggcagatcacttgaggtcaggagttcgagaccagcctggccaacatagtgaaacctcgtctctactgaaaatacaaaaattagccgggcatggtggcacgcacctataatcctagctgctcgggaggctgaggtgggagaattgcttgaaccaggaggcagaggttgcagtgagccgagatcatgccattgcactccagcctgggagacagagtgagactacatcttaaaagaaagaagtgggacttactatgctacgtggttttgagggcagcttttaactttaagtggggagagactttaggcagcttggagtcccattaccactttgttaatggctttcaagtctctgatgacccttgaatgccaagatgtgtggtcaaagttgtcctggaagaaatggcttaggcctgagtttctaggagcatctaccacatccccctaacccttctcccaccagatcaacttctggaatcttaagagtttccattctcttctggctggccacacagaggacgggacttataaaaaagaagctcacaatgacccagttttcagaagagactctgccctggcctcccacatagctccaagcagttaaccaaagagtgatggtgacccagattattagcaaccaggggacctattaaaccaaggcaatggtagcgtatgtatatccccagaagaagaaacctagttgctctaagttttgctagtgtgtaaatgactgatctttaactctggtttgagaatggatttttaaaataatattgccttaagatattgccatcaggacagtgttgtcagagaagtataaatttttgctgtttcaccctcatttcttacatcatcccatttcttgaaaggcaggccctgggaagagaatatctaaaattctaacaaaacctagaaattaggctcggttctctctgattgaaaggtgataatactgcctgcttcaagtaagacacacacagagagagagagctggggatatgatttcctaaaggcaaacccagctaatgcttgatgaagctcagtccccaatcatcttaggatgctaccgtgggttacaggctgtagttttcacagtcgccttgcttcccagttttgcagttcccagctgattgtcatagcccacttggggcttacccacaatatccagcctcttaagacccagttgctgggcatgattctaactgctgaggtgggcatgtaccagctcatgagaaccaactgttaaatattcaggaaatcatgagctagttgttaaacacagccattattattcattaaattatataaagttagttataattaaatacattgtattataaataaagagcatgattcatcatgcttattattttacttattattttactacattttactacattactaccttattattttagtacattttcctgttttctatgattatttattgtctcttacctctatagagtggaaatactacacagtatgtggtgtgccactacactccccctcccaactgggacatcacttttgcatcttgaaattcaccatggtgggagtatttacccatgaaaataggaaatgctacaaatcaaggtatttttgtcctctcagggtgctggttgttaaactctgagttgggatgattagttgttccaagtgcacactcgggaaatacccatgactggggtcagtatgacacagtggcctggccttatgagcagtcagaggctacagaagcaggtagcaggttatgtctaagcctggcatcagatcagaaaccaggcagtcagaaagtgcgcagagggtcgaggtcaaagcaaaaaaggagattaaaaaccagtcagaaggacagccaatcaaaagtgctcacccccaggaggcctccagccaagacaactgtggctgatgccgtgctgtgggcacccctcccatgtctgcccaatgtccactgtcctacaggtgctgactcatcctgctatgagtacccgcagccttcacctgcaagtgccaggaagttcatgtccctggtattggctggtaatggacaagagttggaggataaacaccctcactttggtgctgtatctgagatgagttccaccatcttccaggggttccctggctgtatatttagagaaacagcacttcaaaaatatctgatatatccagcaaggcagagagccccattgtccactcctgtaacctgttcactaacacacttttgattggttttcttcttcttgttgcacttccctactcgccttttggtgttttctgggtttaaacctcaaataaagcctttgcactcaatccttgtcttagcgagaccaggaaaagtcttacgtgctcctgttgaggccagggtccctcctggcatggctggttagtgcacggctggctaggagatgcagggcaggtctgctgatgtgccctgggacagtggttgggagaggaggcatgagcagatcccgacatggagccaccctgagacaaacctccttgtccctgtcccgcattccaggaaaagcctcactcacatgccctgcagggggcatttcacatggtaagcaggggaggcgcccatcctgaaatcctggcccactgcaaacttgcagttcaccaggaggtaaagacaccactccactcccttgtttgcttaatctggaatcaccctccccacttgagagccttgtgcagttatttgattctttggctgtttcagcagttcacagtgttgcttgttggtgactggctgtatatttagagaaacagcactttaaaaatatctgattgttctgcttatctcctgcagaggcaccaggtttttataaattaaggatctgctaattgccacaagaattcaactgttaaacagaaaatggataaatgcaggcccagagacactatgccatcatcttcctatatacacacacatgtgtatatatatattatatgtgtgtgtatataatacacatgtatacatatgtattttgtatatacatgtgcatgtaatatttatgtataaaatatataaatatgtatatatacatgtgtatgtacatatatacatatttatatatttacatatgtatatatgtatatgtacatatatacatatttatatatttacatatgtatatatgtatatgtacatatatacatattgcatactacataacataatatatagtatatattatatgtatagtatgtaatatatggtataatgtagcataatatagtatagtataatatagtatattattgtatagtatagtgcagtatataatatatagtacaatatatgcaatactatactatatatacattatatatagtaaatatattatgtagcagataatgtttataaatactattatgtagtatattttatatatatatatacacttgtgtgtgtttatgtgtgtatgtgtgtatgtatatatattttaaatttgattgaaaggactagtgataaataatgtgtctcagaggactgttgcctttgccataaacaggttgtctgtttctcccatggggttgagcctggttcagttccacatctgcagaatccaagctgacttgctgagcaatggcctggtgggaatgtgcattgtgactcagcaaaatgtcccagtgtatgttcccatacataatcttattttatgattcttctcttcatggtttgcagttaggttgttgctgtctttttgtgctgtgttcttgcacacattatttttggatacattgggatatacataaatttagcgtcattaccattgatagtaataactataatggcgtttaagtaaccagagccaggctgaagcagaaccgtcattggcaaattgtccaaactcttacataagtcaggggtcagtcctcaaatcagaaatcattctaagtctttcactgaaagaatatttagcacagggaattagtggcacatgtgatagaggccaagagacaacagaggggcctgtgaggcagcctggaggaagatggggcccccgctgggctgcaggagagaggagaaggtcagaacccagaagctgggactgcccatgggtggtgggaccatgaaggagttgcagggagggcaggagggagagagagagagaaagagacacagagacagagacagagacagagacagagtgagaagagggagaggggagaaaaggagaggagagaaaggcaccttaccttgtcttccttctctcttctgattttccaccagggctctcactggcaaaatctacttgtttccagcaatacagagtggatctgggcatgggcagaagatgggtacagcagaaatttggcagttactcagcatgagctgctttcttcacacatggacacaaccacaaatacctgcattttcttttctccccaccaacttccagtcttttagtttgctttgccctgtgaaggcttgtagtcttttctactcctcttgtcagtcaggaaaattactctgataatccttgcacagcaaggtggtagacacatcccatgcttgatttggggggtggtggtctttggccacaaataaatcagaagcccactatagctgacttaagcagaaaaagaatttattaggggaagtggatgttcccataggctacacacagacaggagagcaaggcttgcggcacctccccgaggaggacacccaaggggcaccatggccccactgccatgcagacacgcttctgtgggagtgctagccctgggctccacccctagatgtccactgctgactctcctggaaattgatgtatttgcctttgctcttgcatgagttccaagcacagagttgcatgctctgtgcatgagttccaagcacagcctgattctctctgtggctgtcattcaacccaaagtcccaggagcgcgagtctggtctgtggagcccaatcacatgacgtaccttagctgcaaagaaagctggaacatgggattcagaacttaacctggggagggagggactcttaacaaattcccctaatgcaatgacaagggattaactgtgttaaacattgacaaatcctccatatatactatatcaccaattgagttaaaaaaataggtaagctgctatttaacatggaatctgaggcttgcgggcagtgggtgagggaggtgagaagagatattttgggtcacaaagggagcttctgagggcttctcaatgtccccacatggaagacatcctccttcaccagccctggggtgctgcctctgtgaaatatcatggatttcaacaaaccttaaggtctggtctgtgaaacttctgtctgctaatttgcaagttggcaggaaggaagcaccttggcactttttataataggctttgggcaattatttgtttgcctgtttctattcttttaaattacttgcattaaaataaaatactatctttaaagcttctacattggcccagatcgtcacagtttgcaaagccactgctcttctaccatctcctttgaccctgacaacagcttggcagtgagcaggctgggtgtggcctccattttgcagaggaggaaactgaagttctcagtgttgcagaggaggaaactgaaggtcttagtgttgcacagacgactgtggcggagacagaacccaaacctgacctttgcccttcccaagtggcctttccataccctttgagttctgagagacagggagttcacagaggtggcacacggtaggtctctgaccagccacagcctgctgccttcggggcaggtggccgtgtgttcagagttcctaaaggctggctgaggccaaggtagatggaaggcattctgcctgctgccagctggtctccgagctcactgtggacagtgtccacagctcaccttctgtccctgcactggccctagctcagggtaagtgtgcattagatgctgactgaatgaccgatgagcatgtgctcacagaaggtcaaaaatagaagcttccctgaaggctgaggctccagggacagcatttcctggctttagagtgacttacactcaaattaagagaaattccacattgcctgtgacttcagaatcttctgttgtctgctgtggcctgagacttcagaaccctctctcatatgctacctgatgacttttcttagtccttgtctctcaagaagaatcaggcacaaatttcagaaatgtccacagtggcaatgcttggcgagcgcaatctttccgtgagtttggcctgagctcctttgcccatcgttgctgacaccagagcaactgctaagggaggcaccaggggccgagagagggcgtccagaaatgtggggcttagtaggagaggaagcacagagtcagattacaagtcaattcccaagaacatctctactttcgggcggggtgtgtgtctttaccgtgagccaggtggattcctgcacgctttatttgaatcatctcataaaatgagataagaaggtgagtaatattttaatctctattttatggatgaggaagctgaggcttagaggttaaggtcaggcagcttggaaatggcagagtttgtattttaactcagctctgtctcttcagagtccttgctcctgccgcccccatggtgggctgaagtttacatgttggggtttttgccaggcaactccctggacagcctatcactaagccctcacctaaaaccactgacagtggttcttattttgcttactggacaaaaaaagaaaccgagtttccgatggatttgttttttgggatgacaccgggtaatctcccatgacaatgtcaaggcagcatctctatacggatgggaggacagagacacagggaggaggtgccatttgctaaggaagaactggggctcctgaatcacaagccaggcctccatgtccaacagttcaaagtttccctggcttgtgggaaagatgaaaacagccataaaccctgcacacagcaaatccagcaggaaggcagttacctaaacaagggagcaggttcacgagaagagtcagcgaccacgccatgtggcaaacctcagcagctgggcctgtgtgctctgtgaatgctttaacttgtcctgacttattaagaccctacacactgccctggcctctttgtgttaccttaagctagtgcctttcaacttgggatgattttacccccaagaggacatttggaaatgtctggaggcattttggggggatgctactagcatcttgtggatagagactgacataaagaaacatcctacaatgcacatagtagccccacaacaaggaattatccagctccaaatgtcattagtgctactgctctaattagtgccattagctcagtgttaaggaacactgagctaagcagagcagatgacacaagatcagcccgcttacccacagaccatgagcagggaaagaaggtccagcccagagcataaaagaaagcagcttgaggcagaactacaatgtccgagttatcccactgggcagatcagaggtgtgttcctcactaggggagtattttcaggagcacaaaaatcatttatagcccaatcaccacgccccattctctatcctttcccaataaaaggcacataagttcttagtgtccagtttctttgacaaagccagaagcaaaacctggatatatttcaaacttctccaagtaaaaatcccactgagtgtggcgctcactgttggagaagtcattgttgttagtcactgtggggagctggtcagaaccatcccactggacagctctatggagggatcactggcattgtactttggtgacacaggcgctgtctcctgggtcttaaacagcttaaacttcaggtcgccatttgcaaacttggcccctaaatctcagccttggagatcttttcatgcaactgtaattcaaattttaataacaaatctagatttttaaaaatcacagtgtcaagcacatggcctgtctgacatatagcaggtgctcaataaatacttgaatgaataaatgaatgagtgattgagtgagtaaataaagcccagagataaaaggtgactttcccagggtcacacagggaaatagcaaagtggtcctgctctccctccatctgttctctggtagtacttaatttggggttgatattcttgcagcactgacctctcttgtcagcagtaagtatctgtaacaggtgacttatctttcctgttagactatacactcctcaaggacagttgtgtgctgtaacaccacttagggaacttagccaagagccttgcacacagtaggaagtcaataatgtgtgatcaacagtgtgttccctctaatgctgcacattttgggcctttgagttggcgtatagggcttttagcatcttccttctttgcgttgctgtaagttgtcaagttttgctcttatcggtgcttgcttaatttgtggctttcaaatttgtgtcttcaaagttggcataggcaagaaatcaataaatcaaaaccaaaattgagtatgtacacacaaacaccacacacacacacacacacacacacacacagagttgattcttattattcgaggtacttatgttctatacagtcactgcaaacactgaattaattaatgctagaccattgtcctggaggaaacacagggttaaattcctgcaagcctctgatcccaacacagaccaatccaaagccaggggcaagggatgggggtggggagccagggtctgagtcctgaccacttggtccaaccctgttctgtcctcagacattctaactttgtgtgtcagcaaaccaagctaattggagtcacctttttgccacttccatgtgaacgagttctaattaacttatttgttcaataaaaaagtattttattgtattctagaaatgaaatacagctgatactgccttatttccaatgacagaaaattcttcgtctagtgaagcactttacagaatacagcttttgttaaaacacttccctgacacacagacatacagaaacattcattaaacaccagtggtggcccaggcgctgaatgggctttggaggtgacaaatgcatatgacagtctaaaccttcagttggtttcatggtttaaattcttttcaactttacagaaagtactccttttaacaggggaaaaataactttcttcttagctttttttttcatttagcttttgtaataataatgctgtgtaaaaaacaactaaaaagtctcagtggcatacaagagcatgcaggtgggctgggtggcttggagggactcagctgggctcactctcaggtctggggttggctggggtttggctgatctagactggatatggctgggtggctcagcttcttgctccatgtgtgcaggttggctgagatggggtggcatcagattgcgatgctggagtatctgttccacattattctcatactccttataccagtgggctagccaggcatgttcttctcatagtaatagtggagatgcagcaaggcaaaaggaaatatgtgaggtctcctaaggcatgggctcatttccacctcattctgttggctaaagcaagtcacatggacaagcccaaagtcaaaggggcagggaaatgattgcctctttactgtgagagattgcaaagtcatgtagtaaaagacatgagcacagagagggggaaagaattggggtcaataatgcaatcttctacatcatggccttaggtccaccttctagaaatccactctagctaaacacgagaagcaatcactatcttaaagatgacttctacttctgttttgggttgctcagctggacttggggatctcactgtggctttctcccctctggacctcacttttctcaaatggggtgcatggcaggggccatctgtctttggaaggtcccagaaagctggagttggtaccttaatgatgtgctctattcatgagctccctggaggcaaggctctgtatcattccaagttgcactctgcaaattgctaagttccagggaagccaatattaatggcaatgcattaggaatgaggttatcttgaatttgtgtacttgttcccaaaactaccctgagaaactgtttgcattaggctaattttgttcattccttttgtaggaacatgttctggtaatagattcgacaagctatgatatttcctttaaagccttgctagagtaagattgatttcctccatgtgaagtacaacgcatcccgtctattaaacaaattaaactacttaggtcgacaaggctacaagaaggagcagtggtgagctgataaatgtttaacaaccaactctctggaagaaaatgtcttgatttgtagtatttgacaatttccatggtataagcactcctacatggcagactttaagctgccaatgtgatgatgtcccaaatgaagattcagaagaagtgcacctgtatgagcctgctctaccaccctgctgcccatgctgctgtgctgttgagatggattctcttgctgggtgttcttaggggagaggacatggcacttatgtgctatgtagagtttcttagaagttcaagtcagcaccggatcaatcagggtgaatccaaagtgcttatggaaaggactttctctgggatggcactgtttaaaagtaataataacactagctactttcccctctccccccatggtaactccacaccaggtacttttttcagtatttaacatgcattaacgtaattacttcttaccaaaactctatgagataggctctattggcatgaagagttaaatagtgagctttggactactctagttaaatagtgagactgagatttgaacccagctgttttggctgagagtccatgacttcaaagtcatgaagctatcctgatacccactcagaaccaggggagtttaaaattgggtccgatatccctactcactcccatatgaacagctccgccgaacactttgctcttatccacattctccatttggcaaataaatcctctgcaagatgcagcaacaagcatccccatccccacagctgagtgtgtcccacctacctgtgtgatgatgcatacctgaggccccagtcagaggctccacccagtggtgggcaagcccggcttttactggttaaaaggtgtttaaaaacatcttcaggaattttgcaagccattagtaaaaattaagttataagaacttaaaactaaatctatcatattaaaaaataaaggacataaatacccatcactcactacttcctaattattctactgtaatctgtgctcttggggttatttatgtcgatggcatctgtacagtggaaatatctatgtgatgatggtcactgagcttctcttcccgactccatcacatcagaagtttgaaatcatccatggtgggactatttatatcacgaaaatcagcaaacgctgcaaaacaggtattggtttattgttttgtggattggctagacataagaaaatgtcaataaagcacatcaaacgtacaagtctgccatgtctgtatttgttacattgtaaataacacaaaacttaaagaaatatattcccaatattttaaaactatgattccattgagcaaagaaatccctcagtgatgaacaaatggatatgccaatatacagctttgtgtcacttttgtctcacttgttgatgcaaacaaaaataccaaccaacattcatgagggaagtatactcatttgtcaattgcaatcacagtttggctacaagagttagagaaaaatcaatgaaagcaactttcactttcagccaagatgaactagatttaccctgccacctgaaacaatgaaaaaaaaaaaagatagaatatgaaaactagctctcaaggcattggacaccaggaaagactggaaatagataaagtgagatccattcttaccccagcttactgcctggagaaagtttcaaggcagcaaaacagaggaggaggtcactttgaagaatgggggatgactggaaagttgggagacagacggagagtccggttagactcccagagttgaggagatgaggctggaagtctggagagaccaaagtggccatagcatcacagcagagtatcagagaagagacagctgctcagacggaacacttcagagctcttcagaagtcccccgtattcagctgagtactcatcagcatgatagctgtgcattacctgctctttacccacctccatcaggttaaagcctgcagggttgtgcataaataattgttacagatcagatttacgcatcagtaggcaccgctttaaattaattcacctggacaatgaaagagcgagagttgatttattcacagcacgtcggggatgaagcattattaaggaggggagatagaatggcatgcaatgctttgcaatgtaccaacagctaatggaactctgcaagtggctgtatacatacagatgcaggtgtcagcctgggccaggcagctggagctacagttgctatgtcctcgggattcagagtcatgggcaagctggagggaattattatttcttcatggtataattttttaaaagcatgtattgatatgtgtggtgatgaagttattgtgctattaccaggctggatggcggggtggggtggacaggaatggacaccaccacttgggttgggaacacagacttccagggcagcagcatgagcacgggagggagaaagttaacttttctcatttacccagagtatcactctgggtgcctggatgctagaaattgtgcttatataatgcctctatatgccagtcatcaaacttgcatataaagccacagaggtacacaggatgggcctgggtgttccaatgtggagaaaatcctcatcctactggtactgctactaaaattacctttcacttgggactatgtgtcaactgtgccacatgcttttacacacatcatctcacttaataggggctgagggtttcctcagatgaaaatgcaggctcagtggtaaagttatttcccaaggtctcctgagacctcccagtgatgtttggtttactccaaagcttgcttgcattttaaactttcatattacaaaatggtgcttaaggaaccacactataaaacattattgttcacagagtgctttattgtttaatatgtcatcatctgatcaatcatttgcatactcacaaccaccctgttgcgtaggtgtctttgatcccattgcacaggtgaggaaactgagctttgggttggttgtgcctcttgcacatttgggggcacctgcgatgtggcagagccagaatcaaaacactggtgctttaccccaaatcctaatctcttcccattctaccttaacgagaagagagttctgaagagcttctcagtgtgctagaatatatgaaagattggatcgagtttgggctggtttactcagaagttatttcaaatcctctgcaagtttcacagggctgcagcacctggatggtggtttaacatggcacttctaaaggactcacacatttagacctggatgattttctctggcctcatgcttaagagctgggcctccagattcagtgggtctgggctgcagttctagcatcaccccttatgggctttagccatttacttaacctttatgagtctcagtttttccatctgtcaattgggaatataatagaacccacctcatctggttattgtgaggtttaacatgagatgacccatgagatcaaagtttttgtgtagtcactattgtcaagactgttgttttgcagcatgctcaggcttcagcagactctggggccagagggcccccaggcagagtcacctgctcaggcagagtcacctgctgctgttaggtgtgcatgaacatggggaatgctgaggggaagcagctggggtgcctgcagcggcagcatcttctgcactgcatcagattttgtgggggatgggggcgtattctaagagatgtgtgaataccactaagaattctaaaaagttctggagagggaaaatctggagaaaggttagattttctgcagagctagcaagcatgggcctgaagtcattgtaacatggggcattaacaccaatgcatcctaaccatactcatggaggtttgatcctgcaacaagtggatggccatccatgaggttgtgctgtgtacagaggaggggcgctcccctctcttggtccacataatgccatagatgttctccacactggtcaataccctctgcatttcttcttcctctgccactctctcacccgagcacaccaggcttcattattgtaaggagtgagatgattccattaacatttatgtagagaagtttgcagctctgagatgtttaaaaacctgagtagggaatcccaactattttaactcaaatataataaggttttaggtattaaaaatatgatttcaacactgttgattttaattggcctcatacacctacacaaacacttggcagacatttaggatctgccgtggagcaccgtgcatcatcacataacgctctgggaactagggtccctgagtcctgattgtggtgatgcttcattccctgggtatccttgggaagaacacatttctaaatttaggcctctgaacctagttacaaggaggggcttgggagcacctgttgttcaatgcccatatctttcttaatttttaaattttaaatgtaaataaatgcaaaataatttttacaataagaagaaagacaaatgcatgagatcctatatgcaccacccagattcagaattggaaaattaccatttccacggcagcccctgtgggcctccactccttgatgtgatccccgggatctacttccacccagagttaactactgtcttggactttgtgtttattgtgatcttgcttttatttatagtttgcttacatatgtatgtgttcctcattagcatgttcagttctgttcagtttggtgccaatgcatcctaaccatacccctggagggctgactgtaataggtggaatagcgtctatgaggtcgtgctgtgtacagaggagggccatgctttctaactttaacatttgattcataccctacttcgagtcttatgcttcgagtcttacttttcccctcagcattggttttgagattctcccattttgtttgagtggccgcagttcattcatttatgtggctgtgtggttgtctgttgttgccaatgccatctaccacctaatgttatagattctgtttgtccagtctttctttcttgatctttcttgcattttttcctggattgcttttctttgtctttttaaaaattccttcaattgctttggaagttttgcactctatttcttctcattttagtgagcaccatagaaatgttaattaacatacttaatgaactttaaaatgtctgaaattaatcaatatctttacttcttctggaacaacactagactttaaacatgttaaccctgcttatcccgtcctctcttagatgcacttaatttccagtattttaattcagtcttgatttttagtcttccaaaattggagatttgaaaaaaaaacattatttcatgcaatgtttgattttatttacccacattttcatcacatttgtccactattccttttcatactctagaacttccttctggaatcttctgtgtaaagtataccttcagagtttcttttagtgaaggtttactactgtgtgcctgtggtcctgaaaatgtctttatttggacattattcttgaacaattgcttcactatacatataattttaggtagaagtttattttttctaggcatatggaaaaggttttttttattatatagttgatgatgtgaagttaaactttaatttacaggtgatttgtcttttcttcctgaatggtttattttcttgtctatgcctttgatggttctgcagcgctttttttttttttttttgggacagagtctagctctgttgccagaggctggagtgcggtggtgtgatctcagctcactgcaacccccgcctcctgggttcaagcgattctcctgcctcagcctcccgagtagctaggattacaggcacacactgccacgccaagctaatttttgtatttttagtagagatggggtttcaccatgttggccaggatggtcttgatctcctgacctcatgatccacccatcttggcctcccaaagtgcagggattacaggcgtgagccaccacgcccggccattgattttcttgttattaatgctgcttggaatttattctccattcttggttttcttcatggattctggaaatgttccattatgtcttccctgtcctcccgcagcaggtccgagactaagctgtcatggctgagactatgagcacttgttttgggcacagaattgaggagtggccaaaaaactcagtaattgagataaatcatattttaatacagtattttaaatatttgttaaaacaaaatctaatgcaaagaaacttgtggccaacaaaatatcaaaattttcaataaagacaggatctggcagtgccatgttgagatatttggagcctgaagcaaaaggaaaatctgcactcctatgatttttttttcctagaacattagtatttttctagaacattaaagtacttgaaaactataaaaaattgaaagtaagtgtattaaaacttgacattattttaagtttaaatgtttcatttataccaaggtcagaatttatcatgtttacttttctagttctaacagaagcaaactcatcaaaaatatttgcattaagaccattaaccattaaaaatacataaaagtctgtatatgggtgcagatttttcctttccagattgtattttctctcctcagtgttattttccattgcagaagcttacattttaaaatagtagtgatgatggtgatgaagatgaagcatagttagatttgtctaaatctcttccgctggttacaggcagagttaggcctagaattctgatccttccttcttagaagagctttttccaattatatctcacttactgaaaccaatattctcatctcatgaccaaaatctctgtaggaggtgaggccacatcagcacccttgggccaggcaactgttggaggagtgacatgcccaccagggtgaatgagctatttttgggtgtttaactgctgaggagggatatgacatgtgggcactgtgtttacatcaagtcactggttctcggacctatcaaggggcatggcactaggaaactgtaccagtcttcgtggctcactataacatgttgaactattactttaccctttggtgctgaatccaatgccatcttagattctagtttaaatgaacatgacatatatcacacatttaagaaacatttctaagagaaaaccctaaaattgagacaatcctactcattaacttactcttttttctatgagtcctattattttcttttagtagctgaatgcctagtctaactggagttccccggaggccttgcttgaaattgactgccaggtatctccttcagcgtaactctttgatgagaagcaaagctgctttgctggctgcttgagtggaaatgtgatccccgatgcttatgttcccataaaaatctttcgtgtggtctcagaataacaactctctattatgtctcagctgccaaatttattggtgtgtgtggggaggggggagggggacagtcaactttgcacagattatcttcaataccccctgttttaagactttagggatgtttatacaaaacagtcaactattagccttcttggcacttggttctgtgggaatattcctcccatattgggaaggcgtgtgaaccatggcttacatgaaatcctcagccgtatcttttgtggctgatgtatgcaccacagaggactagaaactgcttgagttaggaagtggcccaccattttactacccacttggaaggaaagctccaccaactccaccagaccaaggataatactttatcttttattttatccttgtgagattaatggtttatgagatactttgtatgcgttaggaattcagaagccagtgggtggggagagaggaaggtattactacacagaaggaaagcaccgtctctggacacagggccaagtttcagagaaactattgtgagtttttgtcaagttgacccctcctactgcttctggatcttccaaataagctcccacagtctaagattttatattgctggctacgaatatgcaaacgaacttcccttcatcttttttgccttactaagaaaagaaacacaagtttcaggtagcagttgctttagataatttctagactgcgatcccttgaaaagttaatctgtagctcctagtgtgaaggtgattgggagaatttaccagtgatatgtgctctaaatgattgtaattcatatccaggtgtcctcaattagttcttcaagcaagatgataggatgctaagggatgttgttcaccccaacattgaaaacaggtccacttggatttcttagtctaccttacctagtgcttgccaggtctagaactgggttgcctaattaaaatattacattgaaaaaagtctagatatgtcttctctgatactgttgtcactagccacacgtagctatttaaatttaagtataattcaacattcagttcctgagtagcactagccactttttaagtcctcggtagtcacctgtggccagtgcctaccacattggacagcgcagatatggaacatgccatcataacataaagttcaattgggcagtgcttgtctctggatggagcacatagcatttctgcctgtttcaggcagtggaagcaatattcctgaagttctgattttccagcctctggctcttacaaagttgttactgtatcctcatttaacaaacttatgataataactttatatataatatgttcttttacaaagtagttattatatctcttattccttctacgtctgccacccaaagttacctgaagatctgctgcaactttggcatttatactgctttggtgaaaatcataactttagcatctctgagatttttcttttttatggaatatatcctacagctagtttagataatgttggatgactctccaagtccctgtgtttggtttttctaaatagttgcagtgagtcctgccagttggcagaggaacgtccagggctggcactaggtgccaagcaggtgctgtggtcctcagctgtgttgcacatgaggtgatggggaaaggagcgccattgcctgggagctcctctggtgatacagatagctgagttcaggcctggtttcctgaagtcactagatggctgttattgtatagattgattaaaataaggggcagagacttctgaaaattatcttgtggtagttttgcaaaagggctacaaaattaattgccactcctcccattgagagatggggatctatgtttcctgcccttgaatctcagtaggctcctgggtgagttttctttctattgctgtgaaacaaattaccatcaactcagcaacttaaaacaatacccatttggtaggtcttacgtctgtaagtctgaagtccagcactgcctggctagattttctgttcagggtgtatcacagggctaaaatcaagatgttggccagaaagaattcttgtctgaaggctctggggagaaatctgcttccaagaaatccaatcagtttggatttctgaactgtattcaggctttcgtagaattcagttccttgtggttgcagcaatggggtttctgtctccttactggctgtgagctggggacctctctcagataccaaagaccacagcattctttttttcatgtggcttcatccgtcttcaagccagcaattgtgcattgaatctcccttgttcttcacatttccatgactacctctttttccatcagcgagagaaggctctctgctttgaaggacccatgtgattagatcatgctcacctggataatcttctgatctaaaggtcacttgtgctatagaacagcacagaatcatggacactcacaggttctatggattacagtggagaaccttggggtggtgctttagaaactacgccacaggttgtgacagtttgatagaatatggtaggaatgactctgcagattcttaggctgggtcataacaggtgacacatgtttgtgcactgggatgaacgctactgcttggagccccaccacgccatagaagaagtcaactactctgaggccactacgctgtgaggaagcccagatatacgtagcagccacagacaggcactctggttgtcagtcctacaccctgagccagccctgaccaggctccagacctgggagtgaactggccttatttgattctagccccagctgtggggttactcccagtctgcaagtcttccagttgaaggcccagccacagaatgggaaacaagccattcccactgtgccttccctgttcaaattcccaactcatgaactggagaatataataatatgattgtctaggcctctacatttggaggtaatctgttatgcagcaatagtaactgggacaaatttgacggtaaaaaagaatgaatattttctcactgatattttttgaaggtctcaggtaaaggtgggatggtggggcctgcaaaccacccctgcccacgaggagttctaataggtgatgacaaacaccaggaaccaaattaattctaaaaacatttattatttatgtgtaccctgtgcaaaatactaggctgaatgctggggacatgggtgcctaataaggggtaacatctctcctttcatggagcttagaggctaagaagagtgaattccaaacatgttcatatgcaaaataattttagataaagataactcttaagaggaaaataaaacagggcattgagttggagcccggtggtggtggaagagaggccactcttgactggtgccaaatgagtcctgtctaaagaggtagcagctgaaatctgaattacagtcagttctgctctcatgcttgttttgaaagtgtgaatttgttccaaggagattgctatgttaggaaacaagttttgcatttgcttatgcatgatttcatctgtaaaaacactaggtaaacagaaaactgcacccagctgaactgagctgtttaggaatacacaaaagacacatgcagggcctcaaacatctacccgtgacctcagctcaccacaagtgttatgagacacacctatgcctctagtgacacagcttttgcctaacttcacatcgcttcctcctgttgcattcataataattcacagctgcaacccctcagatgtccacttccacaagcaagtttaaggcctttttcaaggccaagtgacacatttatcatcatatctatctatttcttatccattcacctgaataaaatactgctaccatttttattaggttcccatcttttttttttttaatgtgtcacatacgtttttgaatgctgggcccctacccccattttcctcatgagccctgtcgtttttaattgcatgattttgcatagcatggtgatttttagaaacaggtagcttgtgttatacaacggactgtgcaagatcccgtgaagatcttggaacaacgagtgcaccatctcagaggcagaaatgagctccatgtgtgatatggtttggttctgtgtccccatccaaatctcatcttgaattgtaataagctaagattattaccttgacacggtctccctttgtcaagggccaggtggagataattgagtcataggggcggttcccccatactgttctcgtgatagtgaatgagttctcatgagacatgatggttttataagcatctgggatttaccctgctggtacattctctcttgtctgctgtgatgtgagacatgccctccgccttctaccttctgcctcctgttttccaacttctgccttccgccttccatgattgtgaggcctccccagccatgtggaactgtgagtctattaaacctctttttcttttgaatctcaggtatgtctttatcagcagcatgaaaacagactaaaataatgtgtctgaggaactgtgtggccaactgaacatggcagaggtcccagaaggggggaggagagaaagccatgaaagctaggttacctggggcctgatagtaaggagtttgaatggaacacaatagagggagtaaaatatagcgttgtttcattaacggtggagttggattgcagaagagcaacagatgggaaggagagggcgcggttctctcctatactgcctgctgtggtccggtgagtgaagtgccccagggaagcttgaggatgggaaatgggtttcctccaacaagttaactcatcttctttcaagttgcaccagggtctagcacagcactcagaggcagactaggagaaatgtaaggttggtcttgggaggcaccttcaccactccctcatctcctctcaccctggaggggaatgctgtgttgtattgtggcgtgttatagtattgtatggaatatgttcacagtggcaaagctgggactggaaacaaagtctaatgtataattgattgattggcagtagatgaaagcacatgttttcaatctcttggggagcagatgacttacattcttagatacttaacaatacccacatggaaaggatttaaataactcatcgtttttcctaccaatgtgttcacaagcatcatgaacttctttgcctgcacactggaaattttttattgtgacattattgctacccagaaatttttgagtccttgactttcgaatgcttctgaggacaaagtggtactgccctctctgacctccctttgattcctcagcaattctgggaagctttttcttggtatcaagatgaggttttaacagggctgatatgtaagtagtgaaggaactccagttgacctgcacatggtgtaagagaaacaacactgactctattctacagggaaggaaactgaggccagggggagggctacactgtagcacaatagagttccaggtttctccatatggctcagacttaatgtattatatccccattctttttttttttttttttttttgagacagagtctcactctgtcacccaggctggagtgcagtgacgtgatcttggctcatggcaacctctgactcctgggttcaagcaattctcctgcctccaagcgattctcctgcctcggcctccagagtagctgggactacaagcatgcaccaccacacccggctaatttttgtatttttagtagagatggggtttcaccatattggccaggctgatctcaaactcctgacctcaagtgatccacccgcctccgtctcccaaagtcctgggattacaggcatgagccactgagcccagcctatacccctatttttttctcccaccacctcacttcctctgctactccttacctaacttcagagaggccagtgacctccaggccttagctggtgatccaggagagctggtagtgttaccaatgggtgcttccttgggcatttcatttcctcatgttctgtggccactctttggaattatctgatgacgtgaaagctctcttggtcttccttgaggctttcctccttgagtgtcgattcccctttctcttcagaaaaggacttgatatgggaattcaccaggatcttccctcagacttgccaggcttactccccgatcttccatcatcttcctctcaccactatcatccgaatctcacacatcttctaaggcctggacacttcttgcttcctctgagaatattcctctgacgattttgccttataccaagccctcttatttatacatttctgtagcctttacatttctatagcctgtacagaatctatacatttctatagcctatatagaggctatacatttctatagcctgtacagaatctatacatttctgtagcctttaattggaccgaccaattactgtagccttggattcccaatccaagttgggaatcttttatttgtaaagtattgactgacagaggagttcaagttaggaaaaccaaatgaaagtagtgtatgggaaatttactcaagaatagagaaaggtctagaatgactgaataactaggcttctggataggataaattggtcagttccaagaatggggctggcctcagctgcatctccagctagcacaatgattctctttgttgctgtccatctccgtctttgcttttctcagttatttttatcccatctttcccccgcaacctgcatcctctgagcttttcttcctttggtgtgcaaaatggccccaaatggctctcctgtcctccactctctatgcccactggcacccacagctgacccaaaccttccctctctgtctcgtagttctaattcctggcccaagaagactttggtagacccattcacccttttgaaccatgacacatgaatcataggtctagctaaccaatgggtgaactctccttgggcctcgtgtccaccaatggcccaaccacctatgactgaaaagatgagatagggtcgggccaggtgtggtggctcatgcctgtaatcccagcactttgagagactgaagcaggcagatctcttgagctcaggagttcaagaccagcctgagcaatatggtgaaaccccatttatctctctctatatatgtatatatttatttatataattttctctctatatataaaataaaaatacatatatagatagtgtatatatatatatatataaaattcaaaaacatagagagagttcaaaaacctctttctagaagcagaagttttcttcctgctctaaacatctatgaatttataaaaacactgcagaattacacccatttaatggagctataaaaagaggttcagttgattatcttattgtaacaataaaagatttatatttttacaaacgaggtagggtgacatcctatgatgcccattcctctgtggtgcatgaatggaggcctcattaaaggcatgttggcaggacaaagaaaaaattggcatctttttttttttatttatactttaagttttagggtacatgtgcacattgtgcaggttagttacatatgtatacatgtgccatgctggtgcgctgcacccactaactcgtcatctagcattaggtatatctcccgatgctatccctcccccctccccccaccccaccacagtccccagagtgtgatattccccttcctgtgtccatgtgatctcattgttcaattcccacctatgagtgagaatatgcagtgtttggttttttgttcttgcgatagtttactgagaatgatggtttccaatttcatccatgtccctacaaaggacatgaactcatcattttttatggctgcatagtattccatggtgtatatgtgccacattttcttaatccagtctatcattgttggacatttgggttggttccaagtctttgctattgtgaatagtgccgcaataaacatgcgtgtgcatgtgtctttatagcagcatgatttatagtcctttgggtatatacccagtaatgagatggctgggtcaaatggtatttccggttctagatccctgaggaatcgccacactgacttccacaatggttgaactagtttccagtcccaccaacagtgtaaaagtgttcctatttctccacatcctctccagcacctgttgtttcctgactttttaatgattgaaaattggcatctttaatacaactcatgttcatttccacagagtttaacacttaatcgtccttgtggtgcttcaggtgtttgaatattgtctcctttatgagatgggcctctggtggcccatctgtcaaacaattcctgtttgaccaccttctccaacaacttcttgttgggaggatcaaaagaaccaatgtctctgatggtgctttaaaaattaaatgttagcttgagtgtccagtgatgggaaattgattcaataatgacataactgtgcaaggggacactatctcatcattaaatgaagttgtagcagaatatttatgtggcaagatgtttaagacattgctaaatggaaaaagtgaattccaagcagtatacacattatgattctgtttttgagaacacaaacacatattcatccttgtatttggaaaagtgcttatcaaaatatcagcagtgataccacctgggtggcaaggttattgatgaggtaaatgttatcctattttttgagctataacttctaaattttctgcaataaacatctatcacttttacaacaagaaaaataaataaattttactagaaaaaaaccctaaaatataatgcaaggctgtaatttcctttttttagatcccactgcactaagcatgtataaaaggctcaagaaataatttttggctcccttaaatcctgtgtggaaaggatgtgtgtaaatgcacaggtgtctctgactgcatttgtgaccatggaaagacgtcattacattgagtggctttcttaggttgtgctcactttatttgagaagtgatcccaggaagcaccaatctgagagcagggaaatgagacagacagtggaagaaagccactactgggcaaatggggcttcatcttactgggacctctgagagaaagagggacacactgcagcgttattctccctgaggagcaaggaagctgggggtatttctccgccgctcccatctgctattggtttaaggatgatcccagagcatgtcaactatttggcacttccagcctccatgcccaggccgagcacgctccagggacctgagaaactctttaccttcccaaaaccacacagcacttgccattggaaggcaccgggttgacacacggaagcgtgatgagtgttgaggggatatgggccaggtaccaacaaaatccactgccatagcattctgcttttcttgttaagcaccacctcagcaatcttactgatgattctgtcctggtggggctgggactgtggcgggaagggagcaggaatggtagggatgtagtaggtccataagggaaatcctgtgactgggcttggtgttatcctgtctcctgtcaaatgcttgagtgttcatttaaaaggctgaccctgcttgatgactctgggaatattcaaaacaaaagatgtgaaatccaggtttcaacattaacccagtatggccagaggaattgaagaatgtaccatgaaaacatgatatcagaactcagagatgtttatttatgagtttggcaaggttttaaaaatttttttatgatgcgtttgagttcttctgcatacaaggcaaaattccatcaacccggccagcctataaaatccctcacaaatcgttttatgatgtgtttgaaatacctcaggctgagttatttgttgacaatttgtcctttatttttgacacctcggctgaggattatcttccccaaaatagaattgctaacttcttggagacctgtgaccactgtgtgctagcaatgtcagtctaccaggcacataaatattcatttattggtgttaagcaggtagcaacagaattctggaccttagttgctggagaagaaacaaagacttttagaactagaatcacaaattgtttattttatggttgaggaaattgaggccgaaggtcacccagccaacttgatgtggagctggaatgaaactccaccatctcgtcccatgaagccgcctctgcacaaggttgattggcggcccattctggttggctgatgaaggacactggttctataattcagcgattcgttctaagtgccagatcagtctccccatagtgggatttgatactctcctcgtattggccactgagtggttggcagtaatttcaccctttatggcttttctgggccttttagttccttagattctaaattggtcaggactgtgtacttcagaaaacactgaccgattacctaagaatattgctaatcagctagaacgaattgttatgggatcctaatataatattttggagtgtcagatacagagagaagacatagctgggagctggcacacttaagttctctggcctggtcctcttcccatcctggtggaggcaattctgaagataaataaattatgtgagcaaaccaccctatggtgaggttaagttcattagagattaaatgctcagaggggaaaagggaagttgacctctttgatgattcaaaaagaacgtcagctgaagtcaaagtacaacattctagggctacccgctggctggtggaggaaggcatggctttcccacagggcaaggacagacaagacaggcagataattacagcttgtgcttgggcagtgcatgtgcaaacagggcggagaacttgtaggttattaagccaaggaaataacttctctctgctgccatgcatttattagtaaaattggaataattttcatttctttttattgcttggaaagattaattaggataaaacagaaaaagcacatagagaactaccaagaatgtagtgtgtgctgagtagatattatctatgtatctgtcatctatctctttatctatccacccatttatctatctatccatcctatcatctatctatacatcccatcttcatctatctatatctatctatctatctatctatctatctatctatctatctatcatctatcatctgtctatccatcctatctaatctatcatctatctatctgtctatctatctatctatctatctcatctgtcatctatccatcctatctaatctattatctatctatctatctatctatctatctatctatctatctatcaatcatctccatcaatgttaacaacagattcatgaccaacaaacatggcttcctgttcatcttctccctgaaactttgtggttttatctttgcacctgcctctatgctcttgcttctgaaggaattttgagcccagttatagcttaacttccttcattggctatacatcaatgtagacatggggctcaatccttttatatcagtttccaacactctaccactcatacaaggtttttggatgcagactttactgaaggttcttagtagtttagggggtccatgctacagcagcactatggcagattcactttattcctattcaactgccacttctccttttttgttagttacagaaccccaattttgtctgtgatggccacaggcttagttaaaaatagtcactcctgcagactttcttgtagctaggagtgtgacatgattttgtctaacagggtaagcctttgctttcctaatacagacaatacctcctttctcctttgctatgttgtcttattcctatctggaaggtaaatgtgatgcttggagaaacagcagacaccttgtgaccataatgaaaaaaggcacatgctgaggaaaacagaaagactctttgttctccgttacattatagaatagccagatcatacctgaattgccaactttggatttattgtcaggtgagagaaaaaacaaatgctctatctgtttaggcctgagtcaaatgctgccctaccatgaagacagaaaaatgataacaaaaactgaagactcaatgtcatgttttgttacatgagtccctggctatttctcctggtgtggggtccagcttccaactactttcttcatcttctatgcccagccctcccctgaccaaccactcaaaaatttcctcacactttattatccagagaaattcagcacttttttttttttttgcatttcatctctctctttttttaatttttatttttaggtcagggatgtatgtgcaggttggttgtataggtaaacttgtgtcatgtcatgggggcttattgtacagattatttcgtcactcactttttgcatctttatttcccagttttaacataaaggagccatcctgtcatgaattagggcacttatttagaagacagaattgatttaaatccagcatacattatatacgttatattactacaatttatgtatatataatatgttaatataaactagatttttggacacatattttaaatttttaaatgtacttaaattttaaatgaacttgctccctgattggctattcagtgtgtatggagggaaaggtaatttggattcaaagaaaggaagtagggaaacattccagttttgggctctgataaattatgaagagaatctaaagagtgttcttaaaagaaaaagaaaaaccagtattttctatttttttttttttttgagacagagtcttgctctgtcgctcaggctggagcgcagtggcgcgatctcggctcactgcaagctccgcctcccgggttcacgccactctcctgcctcagactcccgagtagctgggactacaggcgcccgccaccacacctggctaattttttgcatttttagtagagacggggtttcaccgtgttagtcaggatggtctcgatctcctgaccttgtgatctgcctgcctcggccactagtattttcttaagcagagcttcataattggggtgtgtgtgtgtgtgtgtgtgtgttttctttgagacagtctggctctgtcgcccaggctggagtgcagtggcacgatctcggctaactcgctctgcctcccagggtcaagcgattctcctgcctcagcctcctgagtagctgggattacaggcgcccaccactgcgcccggctaatttttgtatttttagtagagacggggtttcgccatgttggccaggatggtctcaaactcctgaccttcaggtgatccgcccgccttggcctcccaaagttgttgtgttttaaaagagaaacacattcaggggtccatacaactttagacattacttaactcagctttcactttgcatatagtaaattatagagttatcaatgtatgagattcttttagagtgaagatttgcagttttataagttctttatggattatatatctacttctcctaattctacaaaaaatccagtctaatttctgggcacaggcatggtaggagacacctccggtttcaggattagaggaatcctgagagtattgaggaatgcggggttggggggctctgctccctccatgggacgaggtttagctccgtttgttgatgagtcctcattgtaggcatggtgatgtcggaagttaggctctgtgtgactcctgaggctgatggcctcacagcccctgacttttagtgttagtgataatagctgacttttcctgagcaccgactctgtgccaggcactgtgatctcagggactctgcacaagcccccccgcccccgcccccccacagaaagcaccatctgtgttgggggctcggatcccagaaaaggtgagttctctcatccaggtcatggagccagtcatgggttgggggtcccaacccagtgagtctgactccaaagcctcttaattgccatggtgtatgatttatctgttccacttgtgtcttggtcagttggggctgctataacaaaatgccatcgactgggtggcttataaacaacagaaacctctttctcacagttctaaaggctgggaactcaaagaccgaggtgctgacagattcggtccctggtgaggcttgtagacagccttcttcgtgctgacagattcggttcctggtgaggcttgtagacagccttcttctcactgagtccccacatgggagaggtagagtggcgagggctctcttctatctcctcttaaaaaggcactgattccatcatgaagatgccaccctcttgacctaattacctcccaaacgtccatctcctaatacgatcacactggaaattagtgattcagctgtgaattttgggaggacaaaaatattcagtccatagcaacttttatttattgatgatcattttattttggaataatgtattttctccagctttatcaaggtgaataaaattatatatatatttatggtatacaacatgatgctttaatatacatattagtgatataattaccacaatcaagttaattaacgtatctattgactaacatagttaccatttttgttttgggttagggacatttaaaacctactctcttagcaaattttaagtgcacagtacagtatcattaactctagtcatcatgctgtacattaaatctccagaaattatgcatcctgcaaaactgaaactttgtgccctttgaacaacatctcctcatttccctattccccagctcctggcagccaccattccactctgtgcttccaggagctagagagtttttagattccacatgtaagtgagatcatgctgtattcagctttctatgcctggcttatttcagttagcataatggcctccaagttgatccgtgttgttacaaatgagaagatttccttcttttgaaagctggataatatttcattgtgcatatgtatgtgtgtgtgtgtgtgtgtgtgtgtgtatatacacacatatatatacacacatatatatacacatatatacaatatatatatatgaatataccttacattttctttttaaaaattcattcatttattctccactttactgagctcagtgaaggcatctctgtcagcactgggtgggattggggaagttgtgacacagttaatgtaaaattgtccatcctaccctcttcaatgtgtcttttcttatttctttgcactacccaggtgttttaatctttcacctggacgcttgggttgatttcacattttagccattgtgcataatgctgcaatgaacatgggtgtacagatatttctttgagatacggatttcattacctttggagatatactcacaagtgggattgctggatcatatggtaatactatttttaatttttaagctccatactattttccataatggctataccaatctacatttcctccaacagtgaacaaggattcccctttctccacatttttgccaaagtttcttatctttagactttttgataatagtcattctagcaggtgcaaggtgatatctcatcacggttttgctttgcatttctccaatgactaatgatgttgagtaccttttcatatacctcatgtagccatttgaatgtcttttgtggagaaatgacaatttaagtcttttctagttctcaatcaggttatgtttttgtttttgttttgctattgggttgtatgatttccttatatattttggatattaaccccttatcagatatatgatttgcaaatatattattcagtttcatagatcatctcttcactttgttgattgtttcctttgctgtgcagaaatttttagttttatgtaatatcatttgtctacttttgtttttgttgcctgtgcttttggggtcatatctaaaaaatcattgcccagaccaatgtcaagaaacttcttccctgtgtgtccttctagaagttttacaggaccgtgtcttatatttaaatatttaatcaattttgagttgattttcatatatggcattatgtaagagtcaaattttattcctctccacgaagatatccagttttcctaacactatttattgaagagactgtcctttctccattgtttattcttggcacctttgttgaagatcaattggccctaaatgtatgggcttatttctgggctctctattgtgttccaatggcctatatgtcttttttaaatgccatgctgtcttggttactatagctttgttttatagtatgaaatcaggaagtctgataccttcagttttgttcttgctcaagattgctttggctattcaaggtcttctctggttcaatatgaatctgacagttgtttattctgtttctgggaaaaatagcattggaatttttatagggattgcattgagtttgcagattgctgtgggtagtatgaacattttgacaatattaactcttccaacccatgagtgtgagatatctttccatttacttgtgttttcttcaatttccttccttaaaaacataaaactgatttttattattttggtaatggtatctcattataggtaattagatacagaatttttaaaaatttggtatatgaaacagtaaaagctatatattaatgctgtttccccagaatctatttcagttacaactctgtgctgttgctactagaagcatacgtgataaaatacaaaaataagaaaagtttaaataataattcatccttgagttatcttaagatgttatggtagtaacatctaccaaagcacaccttttttcacagtccaaaaaacaagcctgagacctattttttcagtttcgaaaaaaagcaattttcttacaaagtcaaagctttaatatgtaaatgaggcaattaataaacaatatgctctaatagcataataacccaaagtaaaagttctgactttaatgtacaaatcattaatcccctttaatacatttatttctaagtattttattttctttgattgtaaatgggattgcttccttaacttccttttctgataatttgttattcgtgtatagaaatgcaactgatttttgaatgttgatttttgtatcctgcaactttaccgaattcatttattaattttaatagttttttttcggcagtcttcagggttttctacatataagatcatgtcatctgcaaccagagacaattttacttcttcctttccaatttggatgctttttatttctctttcttacggaattactctggctaggacttccattactgtggtgaatagaagaggcgagagtggacatccttatcttgttcctaatcttggagaaaaaaactttcagcttttttttgttgttgagtatgatgttagctgtgacctattcacttatcacctttattatgctgaagtatattccttttggacctaatttattgagagttgaattttgtcaaatgctttttctgtgtctattgagatgatattatttttagtcttcattctataatgtgatatatcacgtttattgatttgtatatgttgaaccaacactgcgtgccaggaataaatcccacttgatcatagtgtatgatccttttaatgtgctattgaatttggtttgctaacattctgttaaggatttttgcgtgtatgttcatcaggggtatttgcctgtaattttgattcttatagtatccttgtctggctttggtatcagggtaatgctgattttgtaaaatgagattggaagtgttctctccccttcaagtttttgaaagagtttgagaagaattggcattaagttttatttcagctcaggacctgatagagtttacaagtaaagtcatcaggtcctgagcttttctttgttgggtggcttttgattacctatttaatcttcttatttgttaatagtctgttcagattatttatttcttcaagattcagtattggtaggttgtatgtttctaggaaattatccatttcttctaggtcatactattggtcagcatataatggttcatagtaatttcttatgaccctttgtatttctgtggtatcagttgtaatgttttctctttcatttataattttactttttggaatcttctctctttttcttagttagtctaactaaaagcttgtcaactttatctttaaaaaaacccacttatatccattgatctttttcattgtttttctggtctctatttcattgatttctgctcttattttctttgtttgcttccttcctctaactttggacttggtttgttctgctatttctagtttcttgtggtataaaatttggttgtttatttgagatcttccttttttcttaatgtagaagtttattgccataaaattccctcttagaactacttttgctatatctcataaattttggtaagttttgtttttattttcatttgtttcaagatatttctttagtttccttttgaattcatctttgactcattggatgttcaggggtgttttcaggagtggagttgcaggggtcacaggggctggcctggtgctggggtctatggaacctgggtcctcaggagatggcctggagtctgagtctatcagggctggattctctgggaaaggcctggtgctggggtctgtggtgaaactggctgctcaccacttctctgagctcagtgaaggtatctctctcagcactgggcaggcttgggggaggcgttgcttagttaatatgaaattgtccttcctaccctcttcagtgtatctcttcctatttctgtgcactatccaggtgctataatcttttacctgaattctttagttctagtgaagattgttttgtgtgtgtgggtagtgtttcaaattgcttttctatgaagggatgagctttgaaatttcctattctgccatcttgctttgaaacaattttaaatgtacagaaatgcaacagagataagttcccatatgtccctcactatccagcttgcccctttgttagcatcttatattgccattgtttccctttttaaaatttctttgatttttaggtttcacattttgggctatgaaaaaaaattccctgcttttcctttcttcttttccctttaactgcaacctgtcttatccccttcttttgaagagaatcagaacttgaactagggagaactgatctttcagagaagatagattcactctggcctagggaaagagaagggagatgagacaccctgctgagccagacagccagcctcctgccgtcgctgccagtaccctcaccagctggacaccagctgacctggcacacagacatctctgccatcaggaagacctgtggggagttttccactgtgaatgccaagaagagcctgcctttctttaacaagtctgtttgctttagactatttgtaccagcttttcagttgaagacaaagacatgtggtcatgagagctgaagtaaaaccactttgtttctgtgttgtttatttaagatggcaaagtatgttaagggcatggagacccttgatcttctgctgatggaagcatttatatgaccctgagtggtgtgcccaaccctttgttcaacaaactcagagagaaggtagagaactagacctgagcacaccctcctggctgcaggtgcagctcacgtgatgtaagtggagagaggccaaagtgtctaattctcccccacccccactcccttgccatgtgtcagttaccctccccagctagggctctgccttctcgccgagttgaatttcatacattcacacaggaatcttggggtggaccaggatggtggtgagcactggcacagctgctttggttcaggtgtaaattgaatccattctatagccagaaaattaattcacttcctcgtgcctcgacctggcatccaggcttcctcactccagcggatcatccccacaccctgtgtgtccataccaatccaagtggggtggagggaaggtgtgttaggaggtctactggcccacccagggcctaggagcaggaatccttacaaagacggggtatggatagggcatatacaagcttgagattcctaaaaatgtgtgtgtttaaggcacaaaaacacttgcacagaaaaatcagatcttaggcttatctgtagggcattataggattgtccacagagcaatgaatctcagagggcattcatttaggaacactaagacacttgggaggttactcaatgttttttccctttcccagtcacactgaaatgcttccagagagattttattgttttaaaattccgccaatgaggggaccccactccctctccccaacccattttgtggtgtttagtagttcacccaaaagtggctaaagcttccatcaagctaaagaacagaactcagtctccttggggaatgtgggggcaattctcactatttgcagtatataatagtctttaaccagcgtcttccgctttcttctgaaaatagaacttgtccattgaacaagtagcagtaacaaccccagggaatcctcctacctccattctcacagtgctgcttgtgcactgaggcatgtgcaaggtttaacctcgagatgagcttccaagacggtcaccagggaagacttcatccggctgcactagttttaaactaggctaccagataatgaacatgtgtgtgtgtggtgtgtatgtgtgtgtgtgtgtgtgcaggtgtgcacatatggtgcctgtctccaaatgatgtttgtttcagtcaagtcatgtgcagaggcagcaagactcttttgtgctttgcagggacatcctggcttgagcttatatgtactcaatattggcattcagttgttgtagttccgtctttcaggtttggggccttcttgtttagtttattttcctttttttcttttctcctactctccttctatctctctctccctcttgctctccctccctccctctttgttgctccttaagggtttcaggtcggcctctgaaaaacaattatgctgacagtcacttacggagactctgccatatgctggcagctttacatcagtggttagaatcttcgcaacagacctacagagtagccgctggtggcaggggatatctgaggagtcactgtagcaaacgctgctgtcatggcccctaggattttatcaccatttttgtgcatacccagcgtgcatttgcctccaacggccagccctcatgtctctgttggagaatggacttctggcctctgggacactctgcctgcacttggagacctagaagtccttggagaatgtgttttattttgaaatcaaactaacaataaatgggtagatttgacaagaagccaatgcagtgggaagccaagtttggaagaggtttctactactttcactctcccttggcttttaagctgttgagatgatatatatatatatatatatatttttgttgttgttgttgttggagtctccctctgtctcccaggctggagtacaatggcatgatctcggctcactgcaacctccacctcctgggttcaagtgattctcctgcctcagcctcctatgtaatttatattaaatgcaacctgaaggccttgagctttgcctaatgtatgtacctgtgtaactcccacccctatcaagataatgaacattttcatcaccagaaaagtttctttggacctcttccaaattaattcggacccctccaaggccacaaacaaccacttgctgatttatattaacatcatttaattttgcctgtttcagaacttgatgtaactagaatcataattgtgtactcttttgtgcatacttttccttcaacattatgttgtgtctagcaataattccatcattcttgttgttgcatagtattctgtcctatgaatacagtttgtttatccattcctctgttaatggacacttaggttgtttatagtttggggctactatgaataaaactgctatgagcatttatgtacaagtctttctatagaacaaatattttcttccagatattttttcctcctctctgatccactgcatttaagcatccattttattttgtacttggagctatttttttgatagctttaaagcagagaaaggggagttttatgattaatttcagtagtctccatgtttttacaaagtagcatcctgaaatgtttgaggcttagaggagacaggacttctgtccagactaccaaagactctcttggatagacttggtgaggagagatgcagggggagagagaaaatcatgaggtcagaggaccccagggaagacagacaagacttcagggccaggaatgagagaaatgtgagcaaagggccatgtaactgcctcagagtcttggttacaaacagaaactacgttcagttaaattaagcagtagaggaatgtattgactgggtgaaaggtagttgatacaatcaagagaaaagctatggaaccatgatcaaaaaaaataggaagaagtttaaggaactgggcaggttagaagagtaaacaaggtcatcctgaaggagtagccaggttaggagatgtgggtcatgaatgcagcagattacaccacagcaaggtcaccctagaccttgaatgtgcagatgataccacagccacaaccaccatagacctcgaatgctacagatgacaccaaagccatggccaccctagatcttgaatgctttaggcaacactgccactcttgccactagagactggatgtacaagctgacactgtcacattgtcatctgtgtggtccctggatgcaagagttgatgtcaagtccactgccatctccaaacctgaacaccgagactagcaccaccctggccaaccaccctgaggctctggatgctggagctcttatctggaactgccactagcattataatcatgttgaacactatcctctcccctgcttccagactagattctaaacaatccctgcctcctgatccactagtttcagattctaggacaggcttttctgaggtcaagcccacattccactcactggagacagtgggcatctggtcttctataatttttctagtggagacaagtgctgtctccttgcaaggctcacattgtgcaattcccaagcagagcaaggaggggcagatactgttcagagtgaagcaccctgatgcccagcacagtcacccacaggggagcttgttcaagcaccaggattctggtgctgtcacctcagtaaccacatattcctgactccattcaacaggcaacatccatcacctgcatcgtggctttgtcatctgtccttagatgtccagcaaggactttccttcagcaacagctggccaagcactgttgatagggactgatgactgctctgcctaaagttcttctcagtgcccacctaacttaggccacgtggccttgtctccacctctaaactcaagagaaggcagtggggcctaggagtcctaatgaggaagtgctaatgggaaggtgaatctctttcatctgaatcagggagatttgcctgagcagactagctaaaatgttttaacattttattatagagaatcttgaacatacaatggcatccaatccatgaataattctgctctttctacacccccttctgtataccccgggcatcccatcaattcatttcacttataaatagttcagtgtgtatctgtagtgtttgaggtcacacaatacacacaagattactctcacttctgacacctactgcaaaattagagatgcgggggtgctccgcaaaccaccctcaggttagataattcattagaaggactcaaagaactcaatgatagctactatgctaatggttatggtttgttacaggcaaaggatccagattaaattcaaccaagggaagagcacctagggcgtggtgtaggagtgtttcaaccgcagagcttctgttgtcttctccccatagggtcatgggtagcactactttcctggtattggttgtgctatggactgaatgtttgttctccttctcaatgcctatgttgaagcgctgacccctaatataatcatattaggaggtaaggactttggaagaaaattaagttaggtgaggtcatgagggtgaagccttaatggtattagtgtctccataagaagaggaagagaccagagccactctctctccacaatgtgaaactcagtaagaaagcagatatctgaaagtcaggaagagagccctcaccagaaccagatcatgctggcaccctgatatcaaacttccagcctccagaaccatgataaataaatttccattgtatacactacccaatctgatattttatacagaagctgaggcatactaatacaatgtgtgacaatatgcacagagtattgacaacctgagaagctcatctgagctttagtgtccaccttctttactggggatccatggtcaactgcccatgtggctgacctcagactcagcccctccagagatcaaattgatattacatgactcaaggcccccaccataaatcacaaatttagactttctgggtggtcagccccagtctcaaactaagaccctcctattaggcatgacattccaagggtttagattacctccccgaagcttggggcaaaagccagaccctctcttagggcaaagttagattctctactacacaatatctctgaataaatagaaccattttaatatgcataactactatacaattatcacacctaaaatatttacaataatttcttaatgtcttcaaatatctagtcagtgttcacatttccactaatttcctaagtgtcatatggttaaccgtttctctgtttgttgtttgaattggaatccaaataagctttgcatgttagttgatataaattttagagtatcttattctataggatccccctccataccttttccttgccatttattttattaaataaactggtagaattttccacaatctggatttcactgattgcctccccatggtgtgttttaacatgttcctctgttccctgtatttctttgtaaattggcagctggttctaaagactcaaccagattcatgttcagttgatttaggctggactacttcatatgtggtggtatccaatcccttgggggagccctgctacctggaatttctatttatgtgatttggggaatcactgatggtcattgcttagatccattagttcactaggggttgaggaatgaactagataaaattaatcctgagctgggcctgtgatcacacagagctctccactccttcccatccccacatttttcaccctacagctcaggtataggaggagcctatgtttctgcctgtgaaaatgttccattactaatttgttggggacaacgatcattcagttttattttctcacatcatgggagatgttttctatctctgcaggtccacaggtatctccactgctgctaggatggggactccacgtcatagctcttagtgtggtgcggcagagaatcacagacccctgtctttgctggaggctccatgaattgatatttctttacccactacttctacctttgcatgatttcctcagagaaacccacagtgtttcatgctgcagttgtgtgactttgtgaactgaagtgttgtaaagaagctataatagggcagtttgggagaacaaagggggcttctcccctccctcaccctacactagggccttgcagacccagcctttaggcaagactacacatatagctgctcctctcccaacctcccttccaccttgcagtcccaccagtcaaaccacacagtccttacgtcacatctccttctcttgggagatttcagcttctccctccttgttaacatccccagccctatttacaaatgatcaggctcatttgggccacagtggtcttctctcattcttgtgggatctgtacatccagcctcagtgaggttccagcccctctacaggaagagaagagttctatctccccacattgctgtttatagctgagaaacctaagagggagaggagttaaatgacttgccctaggttgcacagctggaaaagagtgaagtcagaatttaaactcaggtctgcctcatcccaaagtctatacttttcccatcccatatcctatgttataagctattaatacctggagttaagaataacgaaattgcaggtcaaaagtctttgaggccaggtgtggtggctcatgcctgtaattccagagctttaggaggctgaggtgggtggagtgtttgaggccaggagttcgagatcagcctggccaacatagcaaaaccccgtctgtactaaaaacatacaaaaattagctgagcatagtggcacgtgcctgtggtcccagctactccagggctgagacacgagagttgcttgaacttgggaggtggaggttgcagtaagctgagattgtgccactgcactccagcctgggtgacagagtgagactctgtctcaaaaaaaatctttgactaggtgcttttttatatataattacagtaaaaggcaggcaggctcagggcacaggggcccgtgtgggagaaaatatagatgactgaacctggtgccacagggggatgcttctcagggtgaatgacgggagagggcagtgatgcccagcagggtgaccctgggaacattctacagatctacacatggctagagagagaacgggagggtgaatgttttgttcagttttagtcttgtgaaaaatacattaaaaaattgtagtctgggaaaatggaacatgagtcagctgaaaactcagaattattgaggggtggtggtcctttcctgtgccacctagtgacaaaatgaaagaaggcgtagttgaacatcagactgatttaattgtactcatgaaatgctgacctttagaaccattagatgctctgggctttggggacacctgaaaatatctgcaaacacttcagtgtactactctgcaggctctattgtttactctttccccaacatggagatgagccatcactctgggaatatgactcgcttgaccaccactgggctctgtgcctgcaatgctgagggcagcacagcagggtcctctgaggaggggatgagcaggtggagacagcccagctgctggggactgcagcaccacctgaagtggctgcacagatgcagctcctgtagcactgcctggtcgagggcagtggtgaatgtgttaggggtcaatgtgtgtttgtggcggcatgctaagaaatgttatatttatcaaagtaaaagtattgagagggataaataattcttcctatagtaaaatagggtgttctgtccaagatttattgtcatcttcatgctttcgatagaataataatttgaaagtatacaaaaaaacatgatttttatttctatccattgtatgttacacagcagccattttacaaaaattgctaggggaagggggaggtggagatgccctctcaggaaagaggctttgattaaaaggaagtcctggatgacaggaagtggaaatgaaagccccagggaactgtggggaggaggagtaatgatggggaagatggtgagatgtacatcctgatcctctccaacctgggtcaggggaaatgtagaggcagagggacactagctgtattagtctgttctcatgctgctatgaagaaatacccaagactggctaatatataaaggaaagaggtttaattgattcagagttctgcattgctggggatacctcaggaaacttacaatcatggtggaaggcaaaggagaaataggcacattcttcacagggtggcaagacagagtgagtacaagcaagggaaatgccagacgcttataaaaccatcagatctcatgagactcactcactgtcatgaggacagcatgggggtaactgcctccatgtttcaattatctctgcctggttccacccttgacaccaggggattatgcagattataattcaaggtgagatttgggtggggcatagagccaaaacatatcattccacccctggcacctcccaaatctcatgacctcacatttcaaaacacaatcaagcctttccaacagtcacacaaagtcttaactcattccagcattaacctaaaagtccaagtccaagtccaaagtcccatctgagacaaggcaagtcccttctgcctatcctgtaaaatcaaaagcaagttagatacttcctagatacaatggggatacaggaattgggtaggtacactcattcttaatgggagaaattgaccaaaacaaaggggctacaggccacatgcacgtccaaaatgcaatagggcagtcattaaaccttaaaattccaaaatgatctcctttgacttcatgtctcacatccaggtcatgctgatgcaagaggtgggctcccatggccttaggcagctttggccctgtggctttgcagggtacagtgcccctcctggctgctttcatggctggccttgggtgtctgtggctttaccaggttcacagcacaagctgtaagtggatctgccattctgaggtctggaggatggtggctgtcgtctcacagctccactaggcagtgccacagtggagactttaaccccacatttcccgtccatactgccctagcagaggttctccatgaaagttctgctcctgcagcaaactctgcctgaacatccaggcctttccatacatcctctgaaatctagggggaggttcccaaacctcagttcttgtcttctgtgtacccacaggcccaacaccacatggaagctaagacgacttgtggcttacaccctctgaagccatggactgagctgtaccttgaccccttttagccaaggctggagctgaagcagctgggaggctgggcacaatgtctccaggctgcatagagtagtgggggggccctgggtctggcctgggaaaccatttttccctcctaggcctccaggcctgtgatgggagaggctgccatgaaggtctctgacatgccctggagatattttccccattgtcttggcgattaacatttagctccttgttacttatgcaaatttctgcagctggcttgaatttctcccccagaaaaatggtattttcttttctatcacatcctcaggctgcaaattttccaaacttttatgctctgcttcttcttgaatgctttgctgcttagaaatttcttccaccagataccctaaatcatctctctcaagttcaaagttccacaaatctctagggcaggggcaaaatgctgccagtttctttgtataacaagagtgacctttacttcagttcccaacaagttcctcatctccatctcagaccacctcagcctgaacttcattatccatatcactatcagcattttggtcaaagccattcaacaagtctctaggaagttccaaactttcccacattttcctgtcttcttctgagccctctaaactgttccaatctctgcctgctacccagttccaaagttgcttccaaatttttgggtaccatcccactctctgtggtaccaatttactgtattagtccattctcatactgctgtaagaaatacctgggactggataatttataaaggaaagtttaattgactcaccattccacatggctggggaggcctcaggaaacttacaatcatgttagaaggcaaaggagaaatgggcagcttctttacaaggtggcagggtggagtgagtgcaagcaggagaaatgccagatgcttataaaatcgtcagatctcctgagactcactatcacaagaacagcatgggggaaatcaccctaatgatctgattacctccacctgttcctgcccttgacacatggggattatggggattacaattcaaggtgagatttgggtggggacacagagctgaaccatatcactggtcctgcattccacttggagttttaagtcctctgattaggcaaaaaagggaagaaaattaagttagcacttccatggcccattggttcccatgtggcatggtcagaatccaggtagaccctggggacctgagcagggagaatcagagatgaagccttgggaagctgacagaggggttgccgtgttggggcaaagtggcttggtgcatccaacagctacagagaatggcacccaggctggagctggatgtgagtaccaagaagatttctgcaccacagtgttgggatgggaggccaagtcaaaggagaggattccaggttctgaaggggccaagaatctggaccacaagtttcccagccacaaccgcagcttctgaaaaaccaggcacctcaagaacagacagttgagggcctctccaaggaggccacaggagccacagctgcgtaagacctgcatgcagcctgacttttacagttaatattttagaattttaaaggcatataatgtagaaataatttttaaaaactatttgctgttaggcaatgacttcttttcgtgttttttttaatgagccattttgaaactccaagaggcttgggggccataagaacctcagattaccttaggaaagaattagttaatattaaaagtccctccaaaagagagaagcgttcacagcctgaaatttcagtccagcatttttatttaccaggagacatgggccctgagactttttttacaggtattaaattacagtgttcctctgttgattcctcaatgcaataaaaggcagaaagataatcaccaagaaaaacattagaattgtgtataaaaggctctcaagatcagagagaccaactggcaaataccatcaatgcttttttcccccaccgaggttgccttgagctctgtgggctgtcaagacccaggtttcaaactactcagagatagacacaatgagtcttgagactttgggtctcttcctctttaaacagaaggttagactatctgggttgtgtgaagagcagctgcatcttcttagctggagacatagaggtattgagttgattcagggagtgtgtgcaggaggatgtatatgggtgatgagtagctggagagttgaacatgccaggaacatgttgtctcttcactccccactcattcttctgtactcttcctcatgggctggggctgggactcatgtacggtctgcctgctgctctgcaggtctccatcagaaggggcatagaggaagaccacaaggaggggaaaaaggcctgctctttctcatttgctccttgttcctgtctgcagtttccccgcctttcttctccacactagtggtgactgcccctacagcagcagctgaatctagtttgccgttttcccagcagtaacaaaaccagctttttcatgctccattccagacaccagcaccagctggcctgtgcagcctcctcagatgtctttatccagccccacagggccacgcctctgagctcagaggcaccaacacaaactgtctgatgttccctcctcagtggtgatactggtagttttaccttcatgggacccttcctctaagcatctatgttttaataattctacctcttcttggtgtccctccagtcctagaagtgggcactgcttcctgctgttgctgtctccatgatgactttgtgttctctttttgccttttcatggctctaatccccaggtaataattctttatactaagttctctttgtgaggagaaccatctctgactgggtcataattgataagatgaggagcatccagaggtaaagaagggatgagcaacgtggcattgcttgcactggcattcttatgtgagtctacacctagagacatctggctccagtgtatgtccaccgttagggactctgacgggtgttccctgacttgcttcccatctgctgccaatcttaaagagccagttcatttttcccttttgggaatgtctctagcctctgctcagccttcaggcacaaccaatcacatgaccccagaaggggaagacattcttctactcatcccagtgtaaggcctgttttcccaggcaacatattgcatccactgtagatgtcttcccaggggcttagaaaaaactctctctctacttgtgggagtgtgtttgctgtctggttctcacaagtcaattattctagaacaaagggatcaacatccaaacacattgggttatccaggctttgaaatacccagggatagaaagactacccagaatgtgttgggctcccagctcagttaattttaattttgtcctcagcatgaggtacaaaccagcctccatcactacattcaacttctagtctgctcacagaaattcacacataactcattaagtacaagcaataacatggcagtttaaattcatactgggaatatatacatttttcccatttaagcaacaaatcctataggcataactctggtagaacacatgacaactttatgttccccaagaaaacccaaagcctcactcccaatgacatgattccccacaaagaacactgaagttaacagtggttcccccgaagaacaccaggtgtgcccttgatttatatgtgcccaacttaaagggccattatgttgattttctcctaagagtaaaacagatactacttcttttgagttagagaatgactgagcctttaagtcagtttttacggtcacagggagaagaaaagtgttattctcacttagcttaggaaaaatgcagaatccctttagggggacaggtattctgtaatttagttaagtaatcataatgggtgcttgtactgggttgaatattatcggtccccaaattcatgtccatttagaacctcaaaatgtgaccttatttggaaatagggtctttgcagatacaatttactaatatgaggtcattttagattagggtgggtcttactttaacaactgatgacattatgagaagagaaaacagagacacacaggaagaacatcatgtgacaattggagtgatgtgtctacagaccaaggagtgccacagatcactgtggcgacccacagaagctagaagaggcaaggaagaatccttcccccataagctagagggagcatggccctgccaatactttgataccagatttctagccttcagagctgtgagaaaataaatttctcttgttttatgccaccagtttctggtaatacgttgcaggagccctgtgaaactaatatggtgcatttgattttgaaagatgagaaacccttgagaatagtttttaaataatttttaaatttaaattttaaatttaaattttaatttcccattaaattaatttaaaattaaatttaaattttaaatttaaatttttaatttttaaaaaatagttttttaaaattacagttatggataatagtctacggtacagtagaaatttttaatttgccaaattctttggcagctgactcagtgaggaaggtgagagagaatttgggtagaggagaatttgcaggagctgatgacaatcccaggaaaattcttggaattcccactacacataatttaggattggagccactttattgggacactaaaagatagtgtgactccagaaaaatgcagggcttgagaccatctcattacatgtgtttagaaaattttacttccccttggagaactcaaggaaattaaaacaccattataaaagtaatgcttttttgttaatgaggtaaaagagggagagaggttggattttttaaaagcatattacaatcttttgccaatgaacagaatcaagtgaatactacagaaagaaatctggaaaatcggagttacaaacttgatgtattttgggaccacgtactacacaaccatgtccacagaaggaaatgtgtggtcgaaccacctccattccttctgtttggcttaatgtgtttcctgtgggacaggagaagctactcgacaagggaaccaaaaatacacggcatgattcattcattctccatctctttttctgtgcatttctcagatgttccgctagagagcctgtgttctactccaaataggcaggataatgacacccccttccctaaagatgttcacaacctaatccctggagactgtgaatattaccttacatgtcaagagaggctttgcagatgtgattaaggttgataaccttgacatgggtaaattatctttgattataccagtaggcccaatctaatcacacaaatccttgaaagcagggaatcttgtctaattgtggtcagagagatgcagcattgctggctttgaagctccagaggaagggccatgacccaacaaatgcaggcagcctctagaaggtagaaaaggaaagaaaatgaattctcccatagagtctccagaaagaaacgtagccctccaacaccttgattttatctcagtgggacccatgtcaaaataatgacctacagaactgttagatattaagtttgtgttatttagccacaaacttgacggtcatttgttacagcagcaataggaaacagtaaagacctagcagtatccctgtatttggcaccctttcatcattcatggactgggattgtgatgcaagttgaactactatgtgccagacatcacactacatatggtgtctcatccctcagcactcagaaggaggctatgattatacctctcgctaacaaatactgtaaacccttggagggtggtgactgtgttggtcttacctctgctggcctagaccatggcctaatccagtgcctaaaacatggtaggttctcaataaagatttatcaaatgaagaaaaggatgttcaaggaggttatatggctttctcaggatcaggggacaatatggttataaatcaacacctatccatctaaataaaggtcatatagtttctgttacaaggtataagctccaaaattatagtacatgcatataaaagcaagagtacataaatttattcagtttccagggtcccagattctttacatacagtgtttcatttgggtcttatgatgaagacattaattacatgtattagatggattagaaaaccaaggctcagagaggttaagaaactctctcaaattttatgagtagctgaagcagaaataatttccaatcccaagtctgtaaacatattatttattttcattttcctgggttcatgagttgctctatgaaagcagaatctattattctcttcggatattctaactactcacaataatcatgatcttttgaagacagaaaccatatctattccttttcttttatgttcagagaaagctgattttatgtagcatatcacacactcagatgctattgacctatgacagaatttactgggtttaatacagatatcagagatattcttttactaaatagtgctatttaaaaatgatagaaaaactggaagtatgttttccagactctgtcaagacactttttggttgcttgtcatacagaagacaccatattgagcatagaacaaaatccacctgcatgcagtattgtcttatggttagatgcatgggacttagtctgacatgattgggtttgggtccctgaaccaccattcactaactctgggactctagcaaattatactacttccatgaacctcagttcttcatctataacaatagtccttacctatcaggttttttattttttgcttgttttttatttatttttaaatttggttttgttcttttttggtaaggattaagtggaataaatctgagaagttcttagcatagtgtctagctagtgttattattagtttaaaaatgatgtatatttaatgtgcttattagtgcagtgtttagtatgtaatgagcactcaaaactattgtataatactatcaataagatatggtcactgtcattacggagctttaatctagataagagataagactgatgtatagttttaaaagcctcagagtgaggcttttggtttccagtctggcatgtaaggagctggtaagtcatcactcctgtcctcactacatggcaaaagcagaacatgctgaaaatcaactgttcttagttccatcagagatttgagaccttagggcaaatccttgaccctcaaattggagagacaggcagaaacaaagaatcacaacttactaggcaaaaactcaggaatagaaaactccacaggaactagtactagagaaggaaaacctgaatgtaattgatgaattgctggaggctcagtgtggacaggtcctagaattacaaactccaggtcttagagaggcccccaggcttcactgagttttactttaaggaaccctaccaggtcctcctagggaagattggagaaaaattccctgtgcttctggcagcgcattatgttcttcctaacaaggacctgttctcaagagaaactattttaccagagcctaactaactgggctcttatcagaacctaagtaatctggtagaaggaaaatactcaactctatccctctctagtctccctgaattacccaaagaggagaaaggctgaggagcatttgtgacgaccacatcccagggccataggctcactaaaagaccgtaagaacttatcataggagaattgaatgcttctcctatctccacactttaccaccataccaataggactcctgtataataataaggaatacaattaaaataactaagtataagactttttttaagaagaagtatttagagaaagccaaagacaacgagagaaaaccaaagacattcagaacattttagatttggacactgacagctatgacaaacagtaaacacagcctagcccttggctattctttttttttttttttttttttgagacagagtctcgctgtctcccaggctggagtgcagtggcgcgatctcggctcactgcaagctccgctccccgggttcatgccattctgctgcctcagcctcctgagtagctgggactacaggcgccggctaccacgcccggctaatttttttttccttctgtatttttagtagagacggggtttcactgtgttcgccaggatggtctccatctcctgacctcgtgagtgatccgcccgcctcggcctcccaaagtgctgggattacaggcgtgagccaccgcgcccggccgcccttggctgttctaaacatcacactaaacacttttttagtgtgataaaactaaatgcttatttgcctcagctccttttacccaggacatcatgtctggctctcaacaaaagattatatgttatactaatgaacaaaaaacacagtttgagcagatacagcgagcatcagaaccagattcacataagagaggttagaattgtcaaaccagaaatttaaaactataattaatatgttaatgggtctaacagaaaaagtgaaaagacatgtaagaacagagggggtaatgtgtgcagagagagtaaaactctctcaagaatcaaaaggaaacactcatataatataatcatgctaatacaacagcaatgaagactgcctttgataggctcattagtagactggacatcttcaaggacagaatcactgcgcttgaagaaatgtcaatgaaaacttctcaaactgaaatgcaaagagaaaaaagaatggaaaagacaagataaatatccaagaattacagtttaaaaaggtataatatatatgtaatgagaataccagaaggagaagaagaaaaaaatgaacagaagaaatatttgaagaaataatggctgagaattttccaaaattaatgataggtaccaaagaatacattcagaaagctaacataatatcaagtaggatagcaaccaaaaactacccatagacatatctcattaaaactgcatacaatcaaagatgagaaagtctgaaaagaagccagaggaaaaaaacaccttacctatagaggaacaaggataagaattacattggatttctcttcagaaactacacaagcaagaggagagtggaatgaaatatctaatgtatgaaaagaaaaactccacagcttagagttctttattcactgaaattattcttcaaagtaaagaagaaatatggtttcagactaacaaaaattgcgggaatttgtcaccattagaactgcatggcaagaaatgttcaaaaataagaagagaaacttttcagaaagaagaaaaatgatatagctcaggaacttggatctacataaggaaagagtgttagaggagaaataaatgaaagaaaaataaaatattttccttttcctatttttaattgaacaaataaaaatttattcaaaataatagtatctacaatgaattcagtgattgtagcttatggataagggaaatgaataatagcaatgttataaggaacagaaggggaggaattggcactactctgttataagatgcttacattatacatgaaatggtatagtgttattttaaagaggacttggattagctaacatattttaagttaatatattagctaaaataatacctttgactaaactcaagtgtagtcactaaaagaagtacaaaaagaagtatttatatgctcagagggataaaaattggaatcagttaaaaccagagaaggcagaaaaagagtggaagagtaaaaagagttaaaaaaataaaaagaataagggctacagataggaaacaataaaaaatatggtaaatattaatccaactatattaataatcactttaaaaatcaatggtctattattcattaaaagacaaacactttcagagtggacaaaaaacaggattcaactatacactctctacaagaaacccagctgaggctgagtgtggtggatcacccctgtaatcacagagctttgggaggcccacgtgggaagatcagtagagaccaggagtttgagaccagcttggtcaacacagtgagaccttatctctacaaaaaaaaaattgaaacgttagaaaagagtgatggtgcagatctgtagttccagctacttgggaggctgaaatgggaagatcacttgagcccagaagctcaaggctgcagtgagctgtgatcatgccaccacaatgcagcctgggtgacagagtgagactgactctaaaaaaaaccgaacaaaaaaacaaaaagggacccccctctgggcaaaccagttaaaaagaaaatgactttaaatataaatacatataaattaaaaataaagacatagagaaaaaatgttatgctaatactaatcaaaagaattaattttagatgatatagacctcaaagaaaaaaacaggaatagagtggcattacataataataaaggagtcaactctctaagaagatataaaaatctttaatgtttatgcacctaacaacagagcatcaaaatatgtggaattaaaaactaatagaactgcaagaaaagagagatgaatccactattatagttggcaacatcaacacccctgtatcagtaactgacaggttcgttaggcagaaaatgaataagaacacagatgaactgaatagtaccatcaattaactgaacctgattgacacctatagactgcttcatccaacaacaacagaatacacattcttctcaagctcacacagaatattcactttatgatagactgcattttggggtgtaaagtatgcattaacaaatgcaaaaaatagaaaccattcaatgtctgttctcagcctataataaactaaatatcagtaacagaaataactggaaaataataggtggaatatctgaaaaccttgaagattaaacaacatacttctaaataatacaagggtcaaagaaaaagtctcaagagaaattaaaaaatagttcgaactaaatgaaaaagagaatatggcttatcaaaatttgtgagatgcagtaaaagaagtgcttagagagaaattgatagcattgaatgcttctattggaaaagaagacaggtttaaagtcaataatctaagcctccaacttaggaaactaggaaaagaagagcaattaaatccaaagcaagcagaagaaaagaaataatattaattatagtagaaataaacgaaattaacaacaggaattcaataaggaaagtcaagaaaacaaaaaaaaatggttctttgaacaaatcaataaaattaataaaactttagctaggttaactaagaaaaaaagaagacaaaaattactaatctcagaaataaaagaggggccatcacgatctcatgggacagtaaaaggataatataggaatattgttaccaatgctttactcacaaatttaataacctagatgaaatggaccaattctttgaaagacttagcctaccacaactcacacaaggagaaatagataatattcataggcctatatatttgaaaaaaggagtcaataattagtaatttttcaaaacagaaaacaccaggtctacattgcctcaccagtgaattctaccaaacacataaggaagaaattatgccatttctctacaatcccttccagaaataagaagctgagggaatatttcctaactcatttttatgaggccatcattaccctaataccaaaaccagacaaatatattacaagagaaaaaatctacagatcaatatttctcatgaacatagactcaaaatcctcaacaaaatattagcaaatcaaatccaacaatgtgtaaaatggattacacaccccaaccaactgggatttatctcatgtttccaagtgtgggttaatatctgaaaatcaattaacacaacacatcacaacaggctaaaaaagagaaattatataatcatattaatggatgcagaaaaaacatctgaaaaaatccaatactcacttatgattaaaaaaactttctctggaaacagagaaagacttcctcaacttgaaaaaaagagtatttacaaaaacttgatagccaacattatatttaaccatgtaaaactagattattttgcttataagatcaggaacaaggcaaagatatctgctttcaccatttctagtcaagattgtactgaaaatcctcattaattaaaacaataaaacaagaaaaggatattttacaaggtatacagactgggaaggaagaaataaaactctttttttttttcaaacaacttgattaggtagaaaatcccaaagaacaacaaaaatataaactgctggaataaataagcaattacagtaaggtggtaggatataagatcaatatataaaagtcaattgctttcctatatgccaaggatgaacaacttgaatttgacagtaaatacacaacaccacttacattagcaacaaaaaggaaaagaaaaagaagtatttaggtataaatcaaacaaaacatatacaagatctatattaggaactctataaaactagtgaaaaaatcaaaggcctgaataaatgatgatgtattccatgttcatggataggagaacgcaatactatcttagatgtaggttcttcacaacttgatctatagattcaatgcaattccaataaaaaccccagtaaattattctgtggatatcagaaaaaactgattctaaagattatatggaaagacaaaagacccagaatacccaacacggtgttaagggagaaaaatagtgttgaaagactgacacttcccaacttcaacactaaatataaagccacagtaatgaagacagtttggttttgacaaaagaatggacaaatagatcattggaacgtactagggagcccagggaaagacacccacagttagttagaatcaattgatgttttatgaaggagtaaagggaattctgtggagaataaatagtcttttcaacaaataatgctggaacaattggaaattgacatgcaaataagtaaaaataggcatagaccttatgctttttacaaaacttaactcaaaatggaccattaatttaaatgtaagatataaaactacatacccccaggtaacataggtaaaaatctaggtgaccttgggtttggtgacgactttttggatactacatcagaagaacaatccatgaaaaaaattgataagttggacttcattaaaattaagaaaaacaattgctctgaaaaagacactgtaagagactgagaggacaagtcagactgaggaaaaaatctttgtaaaacacttatctgttaaaggactggtattcaaaatataggagaaaaaacatcttaaaactcacaaataagaaaaccaataagccaactaagaaattggtaaaaggtctgactagatatctcactcagtaagatatatagatggcaaataaacatgaaaatatgctcaacatcatatttcagtaaagaattgcaagttaaaacaatgagatatcactacatatctcttagagtagctgacattcaaaacattggtaacaacaaatgctggcaaggatgtgggacaacaggaactcttattaattgctcatggaaataaaaaatggtacaggcattttggaagatagttttcagtttcttacaaaattaaacatagtcttaccatatgatccagcagttacactctttggtatttaaccaggttgttgaaaacatatgtccaccatgatttgcacatgaatgtttatagctgctttaatcgtaatttccgaaactggaagcaactgaagtgctcacttcaataggcgaatgttaaaccaggtcccatctagacaatggactattattttgtccaacaaaaagaaatgatcaagccatgacaagacatggaagaaccttaaatatatattacaaaagaaagtaatcaatccaaaaaggctatatactgtatgattctcacagcatccctggcctatgagtttggtattaaggttattattggctccattttatagatgactaaactaaggcttatcgtggttaagtcctgaagtcacacattaatggctgagctggggttcaaacccacatctgctgattccaagttacagttctttttgctaactggaccaaatctatatgcatttcattctttggctgggccttcactacccaagcttcctatattttctcttattgattccctatttcttgctcatcaggattctaaggtttccattttcctcaaataccatctacattatcaggtaaacgtaccctccttctagccatctagagggtgacaaaatcatagaagagctgtccacacctgttgggatctgagaccctggaggagacattacttctggaaaaaaagccacctgggcagatgacaaaccacgaatgggagaagtgccctggcctcttccccctctctcccttctgcctgccttctgccagtgcctcccactggccatgctggcctggaatccagctggcaaggaagctgagacacatggctggccagagaaggacagagcttctcctttccctgccccagctatagctctccatgagggtttagatacatttgtcttatattttccagtttaaaaattcaagaaagttacctgaaggttattccaaaaaattatctacagataacctagcccaaatttgtggggaaattttgggttatctgccaaggcagcccttacttacaccatgttctggaaacttccttgttccctttctcctctctccaccctgatctgcatgttttattatcttgttcttgtcctgtcttccagtacaggacgcatgaccaaaaggtcaattttgggccaagagaacttcagtttctttccatgtcactagagatatcacctgcatactcagcattctgagtagaagtgacctttgcaaaaactgtgaaataaatcacacataccaaaggatgtatgtgatgagtgtgtacattttaaagaacaatacttattttataaaagccaaatatctgcgctggaacctttggaatctgtcatgtacctccctcaggtgtacctccccacctcctgccattgctttgcttttatagttttgccatatgcatgtgtttttctaaacaatatatgagttgcttttgaactttatataaatggaatcatgtcttaggcattgtattagttcattttcatgctgctgataaagacatacctgagactgggtaatttataaagaaaaagaggtttaccattaaacctctttttaatttaatggtaaactgtgaggtttaccattaaacctcacagttccatgtggctggggaggcctcgccatcatggcagaaggcaaaaggcatgttttacatggcagcagggaagagagaatgagagccaagtgaaagggtaaaccccttataaaaccatcagatctcgtaagaattattcactactatgagaacagcatggagaaactgcccccatgattcaattatcttccaccaggtccctcccacaacacatgggaattatgggatctacaattcaagatgagatttgggtggggacacagccaaaacatatcaggcatctttctaaacgatattttctttttcaatccagtattatcttcttgaaattcaaaaatatttatgtttttaactgtggtgttttccacttcttcctgctccattgtggaatatactgaatttattgattcagcctactttcaatagacaataaggttatttctagatttttttgatgccacaatgatgctatggaaaaattttgtaacttttacttggtgcataccattgtttttctagggccaataaggcaaatatattagggtagaaatgctcaatcattttgcgtgtgtgcacatacacacacacacacagtcatgcatcacttaaccccagagatatgctctaagacatgcgtcattaggagatttcatttttgtgcaaacattatagagtgtacttacacaaaccgagatgggattagcatactacacaccttggctatatggtataacctattgctcccaggctataacctgcacagcatgttactgtactgaatgctgtaggcaactgtaacacaatgggaagtatatgtgtatctaaacataggaaaggtacagtaaaatactgtaaaaaagctaaaaattgatacacctgtatagggcacttaccgtgaatgttgcttacaggactggaagttgctctgggtgagtcagtgatgagtggtgagtgaaggtgaaggcctaggacattactgtacactactgtagacttcataaacactgtatacttatgctacgtacatttcttaaaaaatatttttctttcttcaaaactaaattaaccttagcttactgtaacttttttactgtataaacttttacattttttaaactgttaactcttttgtaatacttagcttaaaacacacattgtccaggtatacaaaatatttatatccttattctataaactttttcctattaaattgtttttttcactttttaaacgttttttgttaaaaacaaagacacaaacacacacattagcctaggcctacacagggtcagaatcatcaatatcactgtctgctgcctccacatcttgtcccactggaaggtctttcaggggcaataacaggcatggagctgtcatctcctgtgaaaacaatgccttcttttacggtgcctcctaaaggacatgtatgaggctgttttacagttaacttttaaaaacaaatagaagtaaactctaaacaaatgatagaaattattatagtagagtaaatatataaatcagtaacagtaatttattgtcattatcaaatatgtgctgtacatacaataattgtatgtgctagacttttatatgactggcagcacagtaggtttgtttacaccagcatccccacagacacatgaataatgcattctactatgatgttttgaaggctatgacatcactaggcaataagcatttttcagcttcagtataattttatgggaccaccattatgtatgtggcccatcactaactgaaatgtcattatggaccacgtgactgtatatatacattgggaaagggagagagagagtcaggttttctgcttaaattattttccaaaatagttttaagccaattatacaccataattaggtatgagcatttccacttctctaaatcctcactgccacttggaatcatcagaccttttatgtttttcatttgcatttttctctggttactaatgagcttgaggatgtttttgtgtgtgtattggtcatttgcttttacttcttatcttaatcagtttgggcttttatagcaatctatcatagattaggtggcttataaacaaaagtaatttatttctcaaagtctgagatccaggtgccaatatgatcgggttctggtgagggccatcttccaggctgcagactgctgacttccggctgtactctcacacggcaggaggaagatgagagtgctcgctaggggcccttttacaacaacattaatcccatgaatgaaggctccatcttcacgatctaattatctcccaaaggcttcacctcctaataccatcaccttgggggttaggacttcaacgcagaaattttaggggaacataaacattcagtccagtgcattcctctttgaagtatctcttcatgtttactaatttttctattaatgctatttatcttttatggatttataaaaggtatttatatacttttgattcaaattctttacattgtatatgtatggcaggtgtctcttaatttgtggcctgcctttttatttattgaaatattttattgaacagaagttctcaattttcatataactgaatcaagctgtcttttcctgtctgattttccctgtttgtgtttaaataatttttgttctgtagaagatgcttttggtgccccagatcacatcccatcagcgcaaggtctgattcagtattattcgtgttggaaaattctacataaacttggattcccttcagtaatttcattaatagagtttctactgttgatttaactttgtgctccaggaataaatccaccttagtcatattaaatatatattattttcctgtctggattcagtgtctaatcttctgtttagcactttgtgcatttctggtcatgctgaggttgtttctaatttccccttccctgtccctgtctggcttttccatcaaagttatgcttctttggggctctgaaagagtttgtacaggagtacaattgtctattccttgaatgcacaaatgaatccaactgttaaactgcctgggcctgatattgtatttgtggaacattttaaattaatgattaagttttattagtgttttttaaacagcattcagatgtttctatttatttgttgagtcagttttagtaaattttctatttctaagaatgtatccatttcatcgaaacgtattggcatggtcataatatcctctcattcctcttaatgtttacagcattcgtagtgaggtgccctttttctttcctgacattagacattagtcacaggtgccttctgcattcctccctctctcctcccccacctctctctccctacttccctctctctcattcttatttttcattctttctgatcaatgttgccagaggtttgtgaattttactagtctgttcagaaaacctacttttggcaaaatcgattgtctcgattgtatctttgcatttcactcattttgttcttatcctttttattttcttctatttcacttaagtttattgttcttttactaacttcttaaattggatgctatgctcatttcttttcacaattgtaccttataaaatatgtggtttttttggtaaggttgtagttttagaaattctactgtaccacttttgcaatggcccaagagttttaataagcaacatttcattagtgttaaagctagtttttaatttttatttattcttgacctatgggttatctggtaaatacatattattcatagatcaagtgtgataattattctgttcaaatcacctctgactttatcagctgttagtatacttgatgtattgattattgggagaagtgtagtaaaatttaacagtgtgagattggataatggattaaaaatgttaaatttaaagttatgttttagatggtctaaatttaaaattgttatatcttcctgggacaatgatattttaacctgtatgtcatgagcctttagctttgaatttattttgctggaacataatacacctaaccagctctctttgggttagtatttgctgatacatttcctctcctttttttgtttactttcagtttttccatgttttcaggttgtaggtgtgtcattttcacaataagcaactaggctaaaacataatacagtataaaaaagtactttttctgtgtagttcatttacaccaattatgatcactgtgattattttcaatcatcttagttttgactttttatttgtctcatttttcagtcttttctctctttgcccctttttaaaacttctagcattttttattgtactagactagaagatacataatcagttttgtgtgtgtgtgtgtgggtgtgtttcctttttttgagacagagtttcactcttgttgcccaggctggagtgcagtggcacgatcttggctcaagcgattctcctgccacagcctccccagtaactgggattagaagcgcctgccacctcacctggctaatttttgtatttttagtagagacggggtttcaccatattggccaggctggtctccagctcctgacctcaggtgatccacccacctcggcctcccaaagtgctgggattacaggcgtgagccaacgtgcttagccagttttctttttttttagtgaatacacgggaaattctaacctgcatatttaacctaataatgaccaatattaatcagcacctttatgctcttctcagacaatacaatgatccaaaaattccttaacctcatttttccctccatgtaagtcttcaaatttctattttctcccattctgtggtttttcagtctcttgatagtatccctttatgcacgacagtttttaatgttgacaaagtgcaatttatctatttttcttttgttgcctgtgcttttggtgacatgtatgagaaaccatggccaaatccagtgtcatgcaggtttgcccctatgttttcttctaagagcttttatagttttagctattctatttctattattgatctattttgagttatttcctgtatgtggtgtgaggtccatctttattcttttgcatgtagatatccggttttcccagcaccatttgttgaaaagacaattctttctccatgtatgggtttatttttggactctcaattttattccattggtctatatgtctatcctcatgctaggaccatatcattttgattactgtacctttgtagtaagtttgaaatcaagaagtataagttctccaactttttaaaaattatttttcaaggactcttttagttatttggggactcttgcaattctgtatgaatttgagaactggcttttccatttccgaaaaaagagttgttggaattttgacagaaattacgttgaatctgtaggtaactttggatactattgatatcttaacaatattaagttttcttattcacaaatgcaggatgtttttccatctgtttagatcttcatttatttcaataatattttaaaattttcaagtatttcacttccttggataaatttattcctgagattttatttttttagatgctattataattggaattcctttttaaattttatttttggattgtttgttacagattttttgtgtgtgtttatcttgtatcgtgcaattatgatgaattcattgattagctctagtagctttttttgcagattctttggtattttctatatataggatcatgccatttgctaataaatatagctttacttcttcctttttaatttgggtgccttttatttctttttaaatgtctttggaaaaaattccaatacaatgtttacagtgttgaaaagaaatagtgattccttcttggtatcaaggataccaagaagttggaattccttgtttattcctgatcttaggaagaaatatttcagtctttcaccattaagtgtgaagctgtgagattttcataaatgcccttcatcatgttgagaaagctttattttatgttgagttttctgagtgtctttatctgagggtgttggatttggataaattccttatctacatcaattgacatgatagtgtgtttttttcttcattctatgaatgtaatatattacactgatagatttttatatgttgaaccacccttgcatttcttagataaatcccattttatcatagtgtgttatctttttgatatgctgttagattcagttttctagtattttgttgagaatttttctgcatcaatattcataaggtatacagtaccatatgtaattttttatgatgtcttttcctggctttgcaatgttaccttcatagaatgaataagaagtgttacttcttctatttttttggaagagaatgagacaaattgttgttaattcttttttaaatatttgatataatttactaggtgtgaagttatctggtcctagacttttctttgttgggaagtttttttttttttaattactgattcaatctctttgcttgttagaggtctgttgagattttctatttcttcttgagtcagtttaggtaatttgtatggttctaggaatgtttcatttcaactaggttatgtaacttgttggtgcacaattgcttgcaatattttgttatgaccctttgtatttttgtagggttggtagtaatgacctcactttcatttctccttttagttatctatgacttctctctttttatgtctgtcagctcagccagaagtttgtcagctcttttcatatttatttatttattattatactttaagctctatggtatgtgtgcacaacgtgcaggtttgttacatatgtatacatgtggcatgttggtgtgctgcacccattaactcgtcatttacattaggtatttctcctaatgcaatccctccccactcccccaaccccacgacaggccctggtgtgtgatgattcccaccctgtgtccaagggttcccattgttcaattcccacctatgagtgagaacatgtggtgtttcgttttctgtccttgcgatagtttgctcagaatgatggtttccagctttatccatctccctacaaaggacatgaactcatcattttttatggctgcatagtattccatgatgtatatctgccacatgttcttaatccagtctatcactgatggacatttgggttggttccaagtctttgcaattgtgaatagtcccacaataagcatatgtgtgcatgagtctttataatagcatgatttataatcctttgggtatacccagtaatgggatcactgggtcaaatggtatttctagttctagatccctgaggaatcaccacactgtcttccacaatggttgaactagtttacagtcccaccaagagtgtaaaagtgttcctatttctccacatcctctccagcacctgttccctgactttttattgatccccattctaactggtgtgagatggtatctcattgtggttttgatttgcatttctctgatggccagtgatgctgagcattttttcacgtgtctgttggctgcataaatgtctttttttaagaagtgtgtgtttatattcttcgccccctttttgatggggttgtttgattttttcttgtaaatttgtttaagttctttgtagattgtggatattagccatttgtgagatgggtagattgcaaaattgttctcccattctgtaggttgcctgttcactctgatggtagtttcttttgctgtgcagaagctctttagtttaattagatcccatttgtctattttggctttagttgctattgcttttggtgttttagtcatgaagtccttgtccatgcctatgtcctgaatggcattgccttggttttcttctagggtttttatggttttaggtctaacatgtaagtctttaatccatcttgaattaatttttgtataaggtgtaaggaagggatccagtttcagctttctacatatggctagccagttttcccagcaccatttattaaatagggaatcctttccccatttcttgtttttgtcaggtttgtcaaagatcagatagttgtagatatgtggtattatttctgagggctctgttctgttccattgttctgtatctctgttcggtaccagtcccatgctgttttggttactatagccttgtagtatagtttgaagtcaggtagaatgatgcctccagctttgttctttttgcttaggattgtcttggcaatgcgggctcttttttggttccacatgaactttaaagtagttttttccaattctctgaagaaagtcattggaagcttgatggggatggcattgaatctataaattcccttggccagtatggccgttttcacgatattgattcttcctttccacgagcatggagtattcttccatttgcttgtgttctcttttattttattgaacagtggtttgtagttctccttgaagaggtccttcacttcccttgtaagttggattcctaggtattttataccgtttgaagcaattgtgaatgggagttcactcatgatttgcctctatgtttgtctgttattggtgtataggaatgcttgtgatttttgcatattgattttgtatcctgagacttagctgaagttgcttatcagcttaaggagattttgggctgagaggatggagttttctaaatatacaatcatgtcatctgcaaacagggacaatttgacttcctcttttcctaattcaataccctttatttctttcgcttgcctgattgccctggccagaacatcgaaaacactatgttgaataggagtggtgagagagggcatctctgtcttgtgccagttttcaaagggaatgcttccagtttttgcccattcagtataatattggctgtgggtttgtcataaatagctcttattattttgagatagatcccatcaatacctagtttattgagagtttttaacatgaagggatgttgaattttatcaaaggccttttctgaatctattgagataatcatgtggtttttgtctttggttctgtttatatgctggattacatttattgatctgtgtatgttgaaccagccttgcatcccaggaatgaagccaacttgatcgtggtggataagctttttgatgtgctgctggatttggtttgccagtattttattgaggatttttgcatcgatattcatcaaggatattggtctaaaattctcttttttttgttgtgtctctgccaggctttggtatcaggatgatgctggcctcataaaatgagttagggaggattccctctttttctattgattggaatagtttcagaaggaatggtaccagctcctctttgtacctctggtagaatttggctgtgaatccgtctggtcctggagtttttttggttggtaggctattaattattgcctcaatttcagagcctgttattggtctattcagggattcaacttcttcctggtttagtcttgggagggtatgtgtccaggaatttatccatttcttctagattttctagtttatttgcatagaggtgtttatagtattctctgatagtagtttgttttttttgggatcggtggtgatatcccctttatcattttttattgcatctatttgattcttctctcttttcttccattagtcttgctagcaatctatctattttgttgatcttttcaaaaaccagctcctggattcattgattttttcaagggtttttttttttttttttttttgtctctatctccttcagttctgctctgatcttagttatttcttgccttctgctagcttttgaatgtgtttgctcttgcttctctagttcttttaattgtgatgttagggtgtcaattttagatcttgcctgctttctcttgtgggcatttagtgctaaaaatttccctctacacactgctttaaatgtgtcccagagattctggtatgttgtgtctttgttctcattggtttcaaagaatatctttatttctgccttcctttcgttatttgcccagtagtcattcaggagcaggttgttcagtttccatgtagttgtgcagttttgagtgagtttcttaatcttgagttctaatttaattggactgtcttctgagagacagtttgttatgatttctcttcttttacatttgctgaggagtgctttacttccaactatgtggtcacttttggaataagtgcaatgtggtgctgagaagaatgtatattctgctgatttggggtggagagttctgtagatgtctattaggtccgcttggtgcagagctgagttcaagtcctggatatccttgttaactctctgtctcgttgatctgtctaatgttgacagtgggatgttaaactctcccattattattgtgtgggagtctaagtctttttgtaggtctctaaggacttgctttatgaatctgggcactcctgtattgggtggatatatatttaggatagtgtgctcttcttgttgaattgatccctttaccattatgtaatggccttctttgtctcttttgacctttgttggtttaaagtctgttttattagtaaccaggatcacaacccctgcttttttttgtcttccatttgcttagtagatcttcctccatccctttattttgagcctatgtgtgtctctgcacgtgagatgggtctcctgaatacagcacactgatgcatcttgactctttatccaatttgccagtctgtgtcttttaattggggcatttagcccatttacatttaaggttaatattgttatgtgtgaatttgatcctgtcattatgatgttagctggatatgttgctcattagttgatgcagtttcttcctagcatcaatggtctttacaatttggcatgtttttgcagtggctggtaccagttgttccttttcatgtttagtgcttccttcaggaactcttgtaaggcaggcctggtggtgacaaaatctctcagcatttgcttgtctgtaaaggtatttatttctccttcacttatgaagcttagtttggctggatatgaaattctgggttgaaaattcttttctttaagaatgttgaatattggcccccactttcttctggcttgtagattttctgcggagagatctgctgttagtctgatgggcttccctttgtgggtaagccaacctttctctctggctgcccttaatattttttccttcatttcaaacttggtgaatctgacaattatgtgtcttggggttgctcttctcaaggagtatctctgtggcattctctgtatttcctgaatttgaatgttggcctgccttgctagattggggaagttctcctggataatatcctgaagagtgtttttccaacttagttccattctccccatcactttcaggtacaccaaacaaacatagatttggtcatttcacttagtcccatatttcttggaggctttgttcatttctttttactcttttttctcaaaacttctcttctctcttcatttcactcatttgatcttcaatcactgataacccttcttccagttgatcgaattggctactgaagcttgtgcatgtgtcacatagttctcctgccatggttttcatctccatcaggtcgtttaaggtcttctctatgctgtttattctacttagccatttttctaatcttttttcaaggtttttagctcccttgcaatgggttcgaacatcccctttagcttggagaagtttgttattaccggtcttctgaagcctacttctgtcaacttgtcaaagtcattctccattgagctttgttccattgctggcgaggagctgcgatcctttggagaagaataggtgctctggtttttagaattttcagcttttctgctctggtttctccccatctttgtggttttttctacctttggtctttgatgaacctgaccttcagatggggttttggtgtggatgtctcttttgttgacgttgatgctattcctttctgtttgttagttttccttctaacagtcaggaccctcagctgcaggtctgttggagtttgctggaggtccactccagaccctgtttgcctgggtatcaccagcagaggctgcataacagcaaatattgcagaacagcaaatgttgctgcctgatccttcctctggaagcttcatctcagaggggcacctggctgtatggggtgtcagttggcctctactgggaggtttctcccagttaggctacttggtggtcagggacccacttgagaaggcagtctgtctgttctcagatctcaaactctatgctgagaggaccactgctctcttcaaagctgtcagacagggatgtttaagtctgcagaagtttctgctgccttttgttcagctatgccctgcccccagaggtggagtctacagaggcaggcaggccttcttgaggtgtggtgggctccacccagttccatcttcctggctgctttgtttacctactcaagcctcagcaatggcggatgctcctcccctagcctcgctgccacctcgcagtttgatctcggactgctgtgctagcagtgggcaaggctctgtgggtgtgggactggccaagccaggcacaggatataatctcctggtgtgctgtttgctaagaccattggacaagtgcagtattagggtgggagtgtcccgattttccaggtaccatctgtcacagcttcccttggctaggaaagggaattccccaaccccatgtgcttcccaggtgaggtgatgtgccgccctgctttggctcacactctgtgggctgcacccactgtccaaccagtcccaatgagatgaatccagtacctcagttggaaatgcagaaatcacccgtcttctgtgtcgctcactctgggagctgtatactggagctgttcctattcggtcatcttggaaccttcaatcagctcttttcatccttttgagaacctacttttggttttattgattctctctattctttttattctcaattttatttatctttaatctccattatttctcctagctttgggtttagtttgtgtgtgtgtgtgttttttaataattgctcaaggcgcaaagttagcttattgatttgagatttggcttcctttacgatgtatgcatttacagctataaattttcctccgagcatttactttgccacattccataagttatggcatgttgtgcttccatttcattcctctgtaagtatgttctagatttctttgtgttttttttttttcttagtcttaacggtcatttaatagtgctgtttaattttcacataattgtgaattttctagctttcttttcgctattgatgtctaacagcaatccattgtgttcatagagtatactttgtattattttaatcttttacattttttgagattattttttaggccttatattttctatcctggagactgttctatgtgcacttgaaaagaatgtatattctgctatggttttgtggagtgctttatgtatgtctgttgtgtctagttgctttttagtgttatccaagtcctctattttgttattggtcttctgtctagatgttctatccagtattggaaatgatgttttgaggtttctaactttcatctctgactgtttcacattttctatgtttgggttttgcctttctgccaccatgtatctaggctaaatttctttttattgatcatgtttgggatttaatgggctacttgaacttttttttcactgtgcttcaatctgtgtaatttctttatttctcccatttatctaattttcttttttgctaattttaagcggttatttaatataaccattgagtttcaagtccccattatttaatttttttctttctcccagtactatttggttatttaaaaaattcctggtcaatattggtaggtttttttgtctctttctcattgcttcataaaactcttttttatctttaaatatattaaacatatttgttctatatttgtatctgttaattctaatatcaccagcctttgtgagtctgactctgggattttgttgttgttgttgttgttgttgtctcttgctcatggtaacttgttttcttttgggcttagtgattgtgttttggcaggtgtggggcaggggtgtcgggagggatgagagacagaaagagagaaagaatactgatgtttcctgaacttttatctgtgtgaattatttgaggcctatttccaaagggaattcatttagagaaaatttcttttactcctgcaaggtacctatccacaagctcgggatacctttcaactaatatttttgcctcatacttttcacagcaaatgagggtataaatttagacccatactcatggaaatacgggcttgtggttaggaattttcagggtaggactattttttccaagtctgcccagagtcaatgttaacttaaactagacatatgcgtattttcttttctgtagtagaacagagggaagaggtcatgggtcattcttttagggtttcagggtcctggcttttgcaggagtctccagcataactttccatcctgctagggccccacactctccctcctgccaccacgtgcatggcaacaaccaggatgggcagaggcaccagagcacatccaacttctgttcctactcactccacttggattttcatgttctcatcgtgtctggtctccgcatttttcactacttacaatctgctgattactctcccagctaacttctcagcctaagtgggatggccttctcgtcaggaacacagtctctatattctgacttttaaaacatattgatatgtgttctacaagcagcgtagaataattgaactcaatgggttgtcttgctttccaaactcagttgggcattttaaaagatgtttcgaataccttcccccagtatttttaggtatgttataccaaaatcatacatctaaattggcaaagcgtatatatgaattggaaaaacatacatgcgaatttctacatatgaactggaaaactagaagaaaacagttttttgggggacaggattgtacgggagaagtaggacaaggaaaaagaagataaaaaagagaataaaaggggataagaagaaagaaaaaacaaagtaaggaggaggaaaaaagtataaagagaaaaatggaaggatgaagtaaagcaggaaagaacacatgtgcgagatagaaactgagtacttcttgagttctccatagaatgcctgtgtcttgttcctggaactgttgtattcctgtccttgggatttgggaaataccctgggtcttatttatttatttacccatttcaatgtagttcctgtattgcaaccaaaagtgccctctgtatactccatcaagtcatgtctaaaactatgggctggcttttctctccaggtatgtggcctctctgctttgcctccttagacacatacaactgtgctcaacaggaagtacaggaaggcactggccaagccctgaccacaaggtacaatatcaaactggtcaatagctcaatttaaagcaacactattcagtggagattgcttaaagaatgtctcatctttcagttgtcttaagtttttacccccagatcaggctataactaaggaaaattaagaatccagatggcatcattctggtttttctgctgattattttactacatatcatttttatttgaggctacaaacatatattgatatttgttataagaaatatggtctgtgtggtttatgggtaccttgcttgttgttatgtttcaattatacccctccaaatccatatgctgtggtcctatccccagtacctcagaatgtgactggatttggaaaaagagtctttaaaaggtaattaagttaaaatgagtcaatagggtgaattcttatccagtaggactggaacccttataagaagaggaaattaggacacagacattcacctagggaaaaccaggtgaagacacagggagctgatttccatccacaagccaaggagagatacttaagaagaaaccaaccctggtgacaccttgatttcagagttccagccttcagaattgtggaaaaataaatgtctgttgtttaagccactcagtattttgttgttgcagccctagcaaactagtacagcacgaatcagtccacagcttcagggtctgagttttcactggttcttgtcaaacatggtattcatgttcctgtgaaagcagtggccaggagatttgtgagtgcagtagattgtctggtctcaatctccagctgtacttacatccttgtcatggcttccttatgggcagagtgtcctttcctgccccttgattttggccatggccatgccacttgctttcaccagtgtcctgtgggcataattaacatggtgccaatttcaagcataggccttaagaggctttctgtgtttccatgtttcctcttgcacccctttcatttctatgagaagaacacgactcacataccttcagatccaaggagagtgagaaacgtgtgagcagagggtccctagcttaaagtagagccacccagtccaccccagcccaaatcggccacccccacccaacctgcagacctgtgagtgagcccaggtgacatcagcagagcctctagacaatctgtggacacatgaagaatacatatggttaaatggcaccaggattctgtaattattacccagaattatgtgtcagtagttaactggtacaatgaaaatgtggccttagattgtttaatcaagatggaagctataattttttcagtattgtgaaagcattgttctttcctcctgaaggagcaattagcctggaagttttgggcagccatattgtacctgtgttgtagacactaaggaggaacagggaaatgggagcaatctgtgttcctacaaatgtggagtcaggggatcaaacaaacactaaggctggaactacctctgaaatgcccagttatatcagaaaagaaatgccttatcattaagcccatgggatttagattttctattaattcaaaaatacagacagaagacttctggttttaggtccaacatgtgaagagattagaagtgatcactcttggccaggcacggtggctcacgcctgtaatcccagcactttgagaggccgaggcaggcggatcacgaggtcaggagatcgagaccatcctggctaacacggtgaaaccccatctctactaaaaatacaaaaaaattagccgggtgtggtggcgggcacctgtagtcccagctactcaggagactgaggcaggagaatggcgtgaacccgggaggcggagcttgcagtgagccaagatcgcgccactgcactccagcctgggtgacagagcaagactcttgtctcaaaaaaaaaaaaaagaaaagaaaagaaaagaaaagaaaagaaatgatcactcttgtccttacaatgtgaaaaatgctgaacaaacttcaaacaaattttcttggatccatcaataattcaagatcagaggcaaactgccaccccaaaatctggagagatgggtaggtacagagaatctgctcacctggagcagaagctgctggagccacaaatgggtaggaacacttagacagcacttgtgatgaacatctggaggctgagtatggactagttccagagtaagaaactcttgtggtctgcagccttagggagaccccacactttcatggatttacatctaagagcccaatcaggttctatacagaagaatgaaggaagatctcctgatggctttagcaggaggaagggaaaggtatccattgtgaattcggagagttgtccatagcatatgcttatgttccaaaagaaaggatttttccagaacctaatgggaggggaaaagctaagaagcacttttgaagatcatagtccaaggacacagacctgttaaaagattatacagttatagaatactttcttttcctcataccttatcactacatcaatagggttttagtaataacactggattacagctgaaagagctgcaaggcatagactttatttaagaagctcaaaggcaatggggaagcccaaaggcaacaggaaaaacaaaaactaaaatatcagacaaatttgaagcctctgacacctgcaggtacagtaaacattagacacaacccaactcctggatagattaacctaagacctcacactgaggcttttacctcagttcttattatctaatatatcgtgtctggctttcaataacaaattacaagccatgctaaaaaggaagaaaaaacacagcctgaagagaagaaagaagcaatgcaatcaagctcagatatgacatagattttgaaatgattaaacagggaagttaaagtacaggtatacatcagagatgttgtgggtttagttctagaccactgaaacaaagcaaatattgcagtaaagagagtcacacaattttttctgtctcccagtgcatacaaaagttttgtttactctatactataacctaataagtgtgcaatagcattatttctaaaaaataatgtacatagattaattttaaaatatttcattgctaaaaaatgctaacaatatcctaaactttcagtgagtcataatcatctttctgtggaggcccttgcaccaatgttgatgactattgactgataaagatggtggttgctgaaggttggagtggttatggcaatttcttaaaataagacaacaaatgaagtttgctacatcaagtggctcctccttttgtgaaagatttctctgtaggatgcaatgttgtttgaaagcattttgaaagaatgctacttctttcaaaattggagtcaatcctctcaaaccctgctgctgctttatcaactaagtttatgtaatatctgacatgtttgtaatcatttcaaaaatattcacagcatcttcaccagaagtggattatatcttaataaaccactttctttgctcatcccaaagaagcaattcctcattcattaaagttttattgtgagattagagaaattcagacacatcaggctccaattcgatttatcttgctatttctaccacatctgcagttcctctatcgaaatcttgaacccctcaaagtcctccatgtgggttgtagtcaacttctttcagacttgtgttaatgttgatattcggacctcctcccatgaattatgaatattcctaatggtatctataatgttgacttatttccagaagatttccaatttgctttgcccagattcatcagaggaatcactctctaagtcagctatagccatatgaaatgtagctcttaaataataagacttaaaagttgaaattactccttggtctatgggctgcagattggatgctgtgttagcaggcatgaatacaacattaatcttgtacatctccatcacagttcctggtggccaggtgcattgtcaatgaacagtaatattaaaaatttttttttttctaagcagtagttctcaacagtgggcttaaaaccatgctatgaactgacatattgtcatccaggctttgttgttccatttacagagcacagacagagtagatttagcataattcttaagggcctagaattttcagaatgataagtgagaactggcttcaagttaaagtcagcagctgcattatcccttaacaagacagtcagcctgtcctttgaagtgctgaagccaggcattgacttctttctagatttgagagtcctagatggcatcttcttctaatagcaggctgtctcatctacattaactatctgttgtttagtgtagccacctccaaaggtatcctcaaagcacaataaattgaagcacaataaaatgaggtatacctgtaagcatgattagctagatttagccattccataatgtctacgtattttgaaacaacatattgtatatgagacatatataaaattgttatttatcaaattaaaaaattttttaaaaataaaagatcacattgtacaccataagtacacatagttttttcaattatacctcaataaagctgggcaaaaagaaaaaaatagccatgattaatatatcaagggctataatggaaaaagtagacaacatacaagaacacataggtaatatcagcagagagctgaaaactctaagaaataaacaaaaagaaattctacaaatcaaaagcactgttacagaaatgaagtttacaataaagccttagatgggctcatcagttgagcaaagagagattggggctatgccaatagaaagttcccaagcagaggtagtacaaacacacacaaaacaagaattaaaaaagcagaacaaaatatcctaaaacagtggggaaatttcaaaaggtataacatacacataattggaatatcagaaggagaaaaaaatgtagcagaaaaaatatttgaagtaaaaatgtcagaaaattttccccaaattaatgacagacacaaaaccacagatccagaaaatttaaagtacatcaagataaataaaaaaataaataaataaacaaacacctaggcatattatattcaaactacagaaaacccatgaaaaaattttttttgtttgtttgtttttttgtgagacagagtcttgctctgttgcccaggctggagtgcagtggcgtgatcttggctcgctgcaacatccacctcctgggttcaagcgattctcctgtctcagccttcagagcagctgggattacaggcttgcagcaccatgcccagctaatttttgtatttttcatagagatgggatttcacctggttggccaggctagtcttgaactcttgacctcgagtgatccatctacctcagcctcccaaagtgcttggattacaggcatgagccactgcacacagcccaatgacaaactcttaaaagacaaaggagaaaaaaaagagtatctatagagaaacaaggataagaatttcagaggacttctcatcagaaaccatgaaagcaagcagagagtgaactaaaatatgtaaagcactgaaaacgaaaaatatggaatttcatattcagtgaaagtatcctaacaaaaggagaaataaaggattttctcagtaaaatagaaactgaggaaatccattgctagcacacctgccctgcaagaaatgataaaaaagttcttcacagaaaaaaacaattatataggtcagaagcttggatctacataaaggaagatcactggaaaagaaataaatgaaggtaaaacaaattgttatttttattgatctaaaagataactttgtttaaaattacagtagtattttatgtggaataacaatgtactgggtgattatagcatatggataaatgcagtgaatgacagcaatgtcataagggatgggaaggaagaattgagaatactctgttgttataaggtagctacattacatgtgatgtggtatcgtgttatttgaaagtggactcagataagttgtaaatgtatattacaattctaggccaaccactaagaaatttttaaaaggaagtgtaggttgtatgctaagagaggagaaaaaaataaaattacataaaatgctcaattaaaactagaaaaggcagaaaaaaaagagaagggaaaaagaacaagtgaaattaatagaaaacagttagaaatatggtagtgaagtaggaggtggaactcaacctagcaggtggggcttggacactgggccaaattgaggactagctgaaacagggatggggcagaagcagctttccataagacacacccaccatgtgccatgtcagcttaccattgccatggcaacacccagaagtgactgcccctttccatggcaacaacctgacaacccagaagttacaactgtttttctagaaatgtctgcataattgaccttttaatttgcatgtaattatgagtgggtacaaatatgactacagaactgcttctgagtggcttctctgggcacactgcctctggggtagccctgctctgcaaggagcagttcttctgtcactgctgtacacagccgcttcaataaaagttgctgtctaacaccactggctcactcttgaattctttccagtggtaagccaagaaccctcctaggctggactccaactttggggctttcctgccccaaatcagtagatatcaatctaattatatcaatagttaactcatgcaaatggtctaaatccaccaattaaaagacaagaattgtcagagtggattaaaaaacaaaatccaaataacaatgtctatcagaaaccatctttcaatataaagatccaggtaggttaaaagtgaagagatagagaaagtgtaccacgctaacactaatcaagaaaactggagtgcctaaattaatttcagacaaagctgacttcaggacaaaaaaattatcagagaccaaaagggtattacaaaatgattaaggggtgaattctctaagaagggataacaatcctaagtgcatatgcaactaataacagcgtatccaaatacatgaagcaaaaactaataaaaccacaaggagaaacagaaaaaaatcactattactattggtgaattcaacacccactttagtttatgattgatgaagcaggcagaaaatccgtaaaaatatagttgatttgaacagcactatcagtcaacttgacatttatagactactccatccaacaacagcagaataaacatccttctcaagctcacatgatactttcactaagattgaccacattctggattataaaatacaccttaatgaatttaaaagaatataaattacgtgaagcatgttctcaaaccacaaaggcattaaactagaaatcaataacagaaagagagctagaaaattctgaaatattcgggtattaaaaacacactttaaaataaacatgggtcaaagaagaagtctcaagagaaatgtacaaatattttgaactaaatgaaaaagaaaacataacttatgaaatacatactcttcaccaacacacccatcaagtcagactgccagagaattgcttgtgctattctgggaataagggcacttcttcagtgaagctattacctaaggatctgcttcaattgctcaaatgactagctccactccgaggcatctggggcattcagatgggcttcattaggtctgaggggcaggcacactgtgattgaaagcttcagagaataagctcttggagagtgaaagaactcatccatttggttcgttctgtacagaacgttcaaatgctgtctggttttgattatagacacctcaacaaagctgcaaaagttttcagatcataaattaaagttattcaaaaaataacatttgcattcccaaacaagatctgagtctctggtctgttagtgatcacttaggcattttgaatttaatcgtgtttaataggaagtgctggcaccaaatttagggatgcatcaaagtttagctttggcctcaatattgtactctgatctgctatgtgcctttgcctgacctcagtctttagcagtccaaagagcctaatttgcctatttcaccacttcattttgcaacagccctctattgtatttcatgaatgatcaaatgattgcataggtaacatatccaatcagagacaatgccgataacaagaataaaacatgaactttatatttcaatatgtgaatatttatctccaaatataatcatccctccttgtccatggagggttggttccaggccacctccctatccccatggagacctcctccctatccccatggagtcccttatataaaatggcatagtgtttgcatgtaactcatgcacatccccctgtaaatttcaaattatctctattacttataatacctaatacaatgccacacatcacttcattagcatggattcaatgtagtactcagtgcacagcaagttcaagtttggctttgtgaaatttttcttctgaatatttttgatccacagttgggtgaatccatgatgcagaaccagtagatacaaaacgccaactctacaggcaagcattctagagataacgtgaagtaacaagtctgcaaatgttgacattatattaaagtatggatatatatttattattgcaagagtaaagtgttgtgctaattaatgattgtgagtcattaaatttatgtataaaagtagtattttcaaatattttaacagggaaagagatcgataactgttataatataaattttaaaactgagagcattacctaaataacttcaataagaccaactatttcatcctttctgaacaaacaaatgtttatcaaaatttgaataataattgtattagtctgcttaagctgcataacagaataccactgactggatggcttaaacaatggaaatttattttctcacaattctggaggctggaagtccaagatcaaggatctagcatggttggcttctggtgaagcctcttactgacttgcaggcagcctattggattagggtcctacctcatgaccacatttaaccccaattacattctatctccaaatacagtcatattgggagtttgggcttcaacatattaatttgggtgggatacaattcaaaccataacaataacataaggtaaaacagtaataataataccactatttggtataccagcatctatagcattaaataacatttaagagctgtattaatttttagttatttaatgccatttaatctataaatcttttaagaaaacatcttatgtaggactttttcatatcttatgaagcaggacaaattaaaatcaggacctcgactttgctagcccaagattccattgagaagaaaaaaaaattctaaaattctgtgataaaacatcttcagtccaaatacgataaaaaagaatgatgaaaaaaaaatttgaaaactatgtaaaaataaacattttgttctcactagtataaattcaaaatgaaagaattcaaagtgttttaataagaaaattctttatagtgttaacaggcacttggtttttaaataaaaatatgtcaaaataagagctctagattgcaataatctcagtagttttaaataaagttaagaatcctatgtgaaaagtttcttctaaaaatgtgacaagggtattttactgaattctacaatgctatactcaaaaagggtaataatcttacttaatgtgctgtttttgtatcctgaattaggcctttggacatggaaaagaagaggtcttttttacctttgatagcatggtggatggcttactaataattttctgggtttctcctagctaataagacatgaatctgctaaagaaacattcttggcgtggaaatgcagtaaaggaaagacccatgcaattgacaatgatatatagattgtgaaggccaggaatgaatgaggagctcacaagcatgccatgttttgtgcatatcttccagtcatgtgttcaaaataaagcagaaggtggcgaaagaaaattactggcctgaagtagataaattgtgagctatgttcttcattcttcttcagccacaggcagactatgaaagatacaggaggttctggagctgtcttgtcaggtgtttgcaccagacatgcacaccagatacagagcagctgttacatgtttaaatgggcttaaaaacaaatggacaaaaatacataaataaaaatatttaacactgcattgtgcagtatgcaaaacttacagaaggaatcactaacaagaatatttactctcagagaaaatagttcatttgctggaaactactgaaaagttaccaaaatgcagcatctcgaaactacaattttttttaaaaaaaaactatgttatctgtcatagaagtcttcatattaatttagttcaaacaacatactgaaatggaagatgctgatggaaagtcaagaaataatttttttatcctaaaagttaattatatcactgttactatgtttctacatttgaactaagggacaacattttctcaagtaattgtgtgttacagcaagtccacataaaaataatcctgctacctgtttatgtatctttatttatatccagatataggtatcaccttaactctgtccctgaaaatattcaaaaagtatcttcttaaagcagaaaaagtatcatgttttagtaaaatttgtatcaccattgaaatctttaagttcaggagttaaaaggaaaaataaaacttaattatttgatgtcagtgtcacctatgctggtagatccagccaaagatgttttacccatcaattaacagtgaacatcaatttaatatcattaaggcatagtatggcaagcacaatgtactctggttggtgatattctggcactatgttatcaaaattgtaaaatgtgactactcaaaattctaattaataaaattataatgacagtagaatttcttttcgataacattttagatttattttggtattccagaagttcattcaaaatgatgtgatatttgctttctgtcttggtttcacccaaatactggtttagcatccagccatattgcatttgtccagatgtgttatttgatgcccctccatttcacacacacattgagagtgtaaaacgttaagtgaggaggtataaggggccacagttttctgtgtgtttagtattaacatccttggaggcaggagtttaaccaagagagcaaaaatcatcacaacatgaaaatacccatgaataaactgtttaaaaattgtgttttcccctaagcatctcaccccactgaaaattagtcatctatctttgcccatctgaccaacttctaagtctgtttggattttggccaattgactcatttttgtaaacccccaacaatttgagacagatacagcacaatttaattgctaagtgaaactgcaaacctagccaaagatgtatgcttttaagaagtcaatgaaagtggtgctggagaacgtctgggggcacctacaagacaattgacaaatgaaaatctggcagagtgcgtcatggttaatggctgaggaatggaaaactgaccaggcagatgacagaagccatgcctcagaaaaggatgattttaatatcaagggatgaaatggggcttttagaaaactgaagaagttatatgtttattagaaacctctttttgtcttattaggataatgaaacatgatataaatacagttgaaaatatagcttaagcatccctaatccaaaaattccaaatccaaaatgctccaaaattcaaaactttttgagcactgaccatgatgccacaagtggaaaattccacaattaatgttgtgtacagaaactttgtttcatgcacaaagttactaacaatattgtataaaattactttccggctatgtgtataagacgtatgtgaaacatgagcgagtttcatatttaggtttcagtcttatccccaagatatctaattatgcaagtattcagaaaatctagaaatatcaaaaatccagaacacttccagtcccaatcatttcagataaggaatactcaacctgtaagagctaatatttattgaatacttattatgtggaagacactgtttaaggtgcttttcatacatcagtctttttttcctcacagcaatcctatgaaataagctaagcaactctcccaaggtcacacaattagcaaatggcctcctaactggcaatatatattctttcagaagaattttcaattgagatataatttatatatcttaaaattcaccttagtaaaatgtatgattcagttgtttccagtatattaatgaagatatgctggcatcacaactatctaattctagaatctgtcatcacccccaaaaagaaacctcatacttactagcagtcagtcctcattttcctctctcccaagaccctgccaactacaaatctactttttgtctgtatggattgtctttttctggaaattttatataaactagatcacacaatacatggtctttgtgtctggtttctttcacttagcataatgtttgcaaggtttttccatgttgcagcatgtataaaagtaacttcattactttttatacattttgtttgtccattcatgagctactgtacaattagactttttctactttttggcaattataaataggctactatgaaccttcaggtacaagtttatatatatatatatctaggaatagaatttctggagtatatatatataaactgcgaagctgttttccaaagcaaccacactgtctaataactaacattcccaccaacaatgtaagaagactaatttttccacatcctcaccaacacttgttattgtctgtgttttgattataactatcctagtggatgtaaggtggtaggtcattttggttgtgatttgcaccttccttatggttaacgatatgatcttattggccatcagtatactttctttggagtaatgtctgttcaaattttgcccatttttaagttgggttatttgtctttttagtgtagaattacaagttccttatatattataaacattagtctcttatcagctatatgatttgcatatttttttcccattatgtagggtgtattttactttattaatagtgtcctttgaagcatagttacttttgatttttatgaagtccaattaatcaatattttattgcttgtgtttttggtatcatatctaaaaaaaccattggctaatacatggtcacaaagacttatgactatgatttcttctaagagttttatcattttcactcttacatttaggtctttgattcattttgacttaattcttgtatattctgagatttgactccaaattcattcttttttcaggtagatacatagttgttccgataccatttgctgcaaaagctatattttcccccattaaatttttttagcacccctgtcaaaaattaattcatcataaaagtatcaatttatttctggactttcaattatattgcattgatctatgtgtctactgttacatccataccacacagtattgattcctggagctttgtagtaagttttgaaactggaagtgtgaattctctaactttattcttttttaaagtttattttcactatttttatctctttcattaccaagtaaattaaaaaaatactttatacttttatatataaagtatatataaactgtgaacgcagttacatgttcacagcaaaattgggcagaaggtatgtggaattcccacatatccccaatcacacatagcctcccccacccaaatgttacaccagagtagtacatttattaccttcaagggatctacattggcacattattatcacccaaagtccacagcatatatgaggtttcactcttggtgttactggttttatgggttttgacaagtataaaatgataaatatttcactattataatatcaaacaaaatagtttatctgccctaaaaatcctctgtgttccacctattcatttctctctcccccaccccacaattggaatcacagaatatagctttttcaaaatgctcaacaccactaatgatcatggaaatgcaaatcaaaaccacaatgtgataccaccttactcccgcacgaatggccataattaaaaaataaaaaataataaatgttggcatggatgtagtgaaaagggaacacttttacactgctggtgggaatgtagactagtacaaccactgtggaaaacagtgtggagatttcttaaagaactaaaagtagagctaccatttgatccagcagtcccactactgggtatgtatccagaggaaaagaagtcatatgaaaaagacacttgcacacacaggtttatagcaacacaattcacaattgcaaaaatatggaaccagcccaaatgcccaccaatcaacgagtgcataaagaaaatgtgacatatatatatatatatatatacacacacacacaccatggaatactacccagtcataaaaaggaacaaaataatggcattcgcaggaatctggatggaattggagaccattcttctaagtgaagtaactcaggaatggaaaactaaacatcttacgttctcacttataagtgggagctaagctatgaagattcaaaggcataagaatgatacaatggactttggggactcaggggaaagagagggagcgggatgagggataaaagactatacattgcgtacagtgtacactgctcgggtgatgggtgcaacaaaatctcagaaatcaccactaaagaacttattcatgtaaccaaacaacacctgttccctcaaaacctattgaaataaaaaaatgttaaaaaagagcaccagtaagctaccacttaacaaggatgctgctaatatttagttccatttctatctcacccctcacctcactctgacttcaccctaccagtaacaaacatccccatcttgtggttactttttacttctttcaaaactataatcatatatgaatgtatccctaagcaacatgtttaatcatgctaatttgcaagatttatagaatatatatcataccaaaaaaaagaatattgccttatcaaattggcttatttcacatagtaacatgtatttaaggttcttccatgtcatttcatggcttcctcgctcatttctttttagtgctgaataatatttcattgtctggatttaccacagtttatccattcagcattactgaaggacatgttggttgctttcaagttttgacaactataaataaagttgctaaaaaatgtgcaggttttgtggggacatgtcttcaattcatttgaataaatactaagaagtgcaattgctggatcatatcataagagtatgtttaattttctaagaaactgctaaactgtctttaaaagtggctataccattttgcattcctgccaacaatgaatgagagtttctgttgctccacaaccttgtcaccatttgatgttgccagtgttctggattttggccattctgttatgaatgtagtgctattgcattgttgtttaaatttgcaattccttaatgacaaatgacattgaacatattttcgtatgcatatttttcatttctaaatatgttctttgtatgtgtctgttcaggtttattgctcattttaaaattgggtggtttgtctttttattgtttttttgttgttgttgtcagggatagacaaggtcttgctctgtcacctgggctggtgcacagtggcgcaatcatggctgtctgcggcctcaacctccagggctctggtgatactcccacacctcagcctcctgagtacctgggactacagacatgcaccagcatgcctggctaatttttgtattttttgtagagttggggttttgccatttttcccaggctggtctcaaactcctgagctcaagtaatcttcattgttgagttttaagggttgttgatatattttgggtaacagtcttttatctgatatatcctttcggtctgtggcttgtcttctcattctcttggcaatgtcttttgcagagcagaagtttttaattttagtgaaatcccacttatcaatctcttctttcagattgtgcttttgatgttgtatctaaaaagccatacatcacaccaataaacctaccacttaacaaggatgctgctaatgtttagttccatttctatctcacccctcacttcattctgacttcaccctcccagtaacaagcatccccatcttgtggttactttttacttctttcaaaactataatcatatatgaatgatccctaagcaacataatgtttaatcatgctaattttcaagatttataaaatatatatcatacccaaggtcaccaagattttctcctatgttatcttctaggagttttatagtttgttacatttaggtaatgatcaagttcgagttaatctttgtgaaaagtgtaagttaatctttgtgtaaggtctgtctagatttatttatttaaaagtagatgcagttattccagcactatttgttggaaagactatcctttctccattgaattgctcttgcttttttgtcaaagatcaattgactatatttatgtgggtctattccaggcccctttattccattccactgagctacttgtctattcttttgcaaattctttgccaaggcttatattgctttaaagtcggaaactgtcaattccctgactttgttgttctttattattttttttattatactttaagttctagggtactggcgcacaatgtgcaggtttgttacatatgtatacatgtgccatgttggtgtgctacacccattaactcatcatttacattaggtatatctcctaatgctgtccctccctgctgtcccaaccccactacaggccccggtgtgtgatgatccccaccctgtgtccaagtgttctcattgttcagttcccacctatgagtgagaacatgcagtgtttggttttctgtccttgtgatagtttgctcagagtgatggtttccagctccatccatgttcctacaaaggacacgaactcatccttttttatggctgcatagtatttcatggtgtatatgtgccacattttcttaatccagtctatcattgatggacatttgggttggttccaagtctttgctattgtgaatagtgccgcaataaacatatgtgtgcatgtgtctttatagcagcatgttttataatcctttgggtatataccctgtaatgggatggctgggtgaaatggtatttctagttctatatccttgaggaattgccacactgtcttccacaatggttgaactagtttacactcccaccaacagtgtaaaagtgttcctatttctccacatcctctccagcacctgttgtttcctgactttttaatgatcgccattctaactggtgtgagatggtatctcattgtggttttgatttgcattcctctgatgaccagtgatgatgagcattttttcatgtgtccgttgtctgcataaatgtcttcttttgagaagtgtctgatcatatcctttgcccactttttgatggggttgtttgcttttttcttgtaaatttgtttaagttctttgtagattctggatattagccctttgtcggatgagtagattgtaaaaattttctcccattctgtaggttgcctgttcactctgatggtagtttcttttgctgtgcagaagctctttagtttaattagatcccatttgtctattttggctttggttgccaatgcttttggtgttttagtcatgaagtccttgtccatgcctatgtcctgaatggtattgcctaggttttcttctagggttttgatggttttaggtgtaacatgtaagtctttaatccatcttgaattaatttttgtacaaggtgtaaggaagggatccagtttcagctttctacatatggctagccagttttcccagcaccatttattaaatagggaatcctttccccatttcttgtttttgtcaggtttgtcaaagatcagatggttgtagatgtgtggtattatttctgagggctctgttctgttccattggtctgtatctctgttcggtaccagtcccatgctgttttggttactgtagccttgtagtatagtttgaagtcaggcagcgtgatgcctccagctttgttctctgtgcttaggattgtcttggcaatgcgggctcttttttggttccacatgaactttaaagtagttttttccaactctgtgaagaaagccattggtagcttgatggggatggcattgaatctgtaaattaccttgggcagtatggccattttcacaatattgattcttcctatcgttgagcatggaatgttcttccatttgtttgtgtcctcttttatttcgttgagcagtggtttgtagttctccttgaagagatccttcacatcccttgtaagttggattcctagactttgttgttctttaatattgttttggttattctaggtcttttgcctctccaaaaaattttagaatttgatatggtttggctgtgtcctgacccaaatctcatcttgaatcgtaactcccacaattcccaagtattgtgggaggaacccattgagaggtaattgaaaaatgggggcgggtgtttctcatgctgttctcatgttattgaataagtctcaaaagatctggtgcttttaaaaatgggagttttcctccacaatctctctctctttgcctgctgccatctatgtaagacgtgacttgctcctccttgccttctgccatgattgtgaggcctccccagccatgaggaatgtaaatccattaaacctctatcttttggaattgcccagtcttgggtatgtctttatcagcagcatgaaaatggaccaatacagaaataatttatatcaaaaataactttttgggatttagatttgtattgcattgaaatatagatgaagttgggaagagctgacatcttgaaactgttgagtctttatgttcataaacaagaaatatatctccatttatttatacttctttgaccttttcagagttttgtagttttcctcataaatttcttttttttttttttttttttttgagacggagtctcgctctgtcgcccaggctggagtgcagtggcgcgatctcggctcactgcaagctccgcctcctgggttcacgccattctcctgcctcagcctcccgagtagctgggactacaggcgcccgccactacgcccggctaattttttgtatttttagtagagacggggtttcaccgtgttagccaggatggtctcgatctcctgacctcatgatccgcccgcctcggcctcccaaagtgctgggattacaggcgtgagccaccgcgcccggcccctcataaatttcttatacatattttgttaagtttttatgtaagtattttattttttaacactaatgtaaatagtattgtgttttaaatttcaaattccaattgttcgttgatggtaaagaggaaagcaattggcttttgaatatttatctcatatcctgtaactttgctgtaattatctataagttctgggagttttggtttgtttattttttgatcaattttttgaattttctgcatagaccattatatcatcactgaaaaaaaatgttttatgtcttatttttcaatcagtataccttttatttctttttcttattgcattagctttgatttcaagcatggtgttgaaatgatgagaagggacatctttattttgttcctgattttagtaaaaaaaaaaagagattttagtttctcaccattaagtatgattttagctgtaggtttcttatagatgctccttatcaagttgaagaagttctctatccctagtttgctgagggtttttatcataaaaaagttagattttgtcaaatgctttttctgtatctatttatatgataatgttatttttcttcattaacctgtcaatgtgatggcttacattaattgattttcaaatgttgaatcagccttgcatacccccactcgaggtggtgataaatcctgcttggtcttcgtgtatagtttttttacacattgtattcaatctgctaatattttattgaaaatttttgaatccatgttcatgagagatattggcctgtatttttctttcctcactgtgtctgtggtttaagtatcagtttgcctcatataatgtattagaaagtaatttctctgcttctaccatatcaatgaaattgtagagacttggtataatttattacttaaatatttggtagaattaaccaatgaacccatctaggcctggtactttatgttttgaaaggttattaatatttgattcaatttcttcaatacatgtaggcatatttagattatctacctttccttgtgtgaattgtgataaactgtgtctttaaagagattggtccatgttatctatgttgtctaattcacaggcatatagttgttcacactatttattattcttttaatgtccatggaatctgtagtgatgtcccctctttaatatctgatattagtaatttgtgtcttctctttttttcttaattagataggctagaggtttatcaatttcatccatcttttaaaagaaccaaatttgaatttcattgatcttctctatagatttcctatttttaattttattaatttcgacattaatttttattatttattttcttatgtttggtttggattaattactcttatttttcagtttactaaggaaaacctcacactactcatcttagatctttcttcttttataataaatgcattcaatgttataaattttcttcttagcattgcttttgctatatcccataaattttgatattttatttttatttagttcaaaatattgtaaaatttttttgaaatatcttctttgatttgtgtatatttggaagtgcgttatttaatctccaagtatttgggggttttccacatatctttctgttatttattcaagtttaattccatcgtagtctgagagcagacattgtatgattttcattcttttgaatttgttagggcatattctatggccaagaatgtgatctgtttttgtgaatgtttatgtgaacttcaaaataatgtgtattcttttgctgttgaatgaagtatttgatacagatgtcaattatatctcattttttgagtttaactgtgcccttgctgaatttctacctgctctatctgtccattctcatagagggttgttgaagttgccaactacaataatggattcatctctttgtccttcaagttctatcaatttttgcctcatacattttgacactcgggtaagtgcctgctcattaagggtatttatgtcttcttggataactgatctctttatcattatgtaatacccctctttatcactgataaattttccttctctgctacctgatatacctgaaattaatatagttactctagctttcttttgattcatgctagcatggtatatatttctccatcccattacttttaacctgtatttttctttatatttaaagtggatttcctgtagacaccatatcactaggtcttgttttttgatccactctgacaatgtcttttaattggtttatctagaccattgacatctgaagtgattattgatatagttggattgatgtctaccatatttgttactgttttttatttattactcttgtgatctgttttaatttttttcttccactctttttctggctttttgtggttgtgtttgagcattttatgtaaatacattttctcctcattcttagcgtatgaattatatttctttttattttagtgtttgccttagagtttgtaatgtacacttacaatgaatccaagtccactttcaaataacactatattgcttcatgggcagtgcaagtaccctataataacacaacgttactattttctatctcctgttcctcatatcattaatgtcatttatttcacttgtccattatatatatatgcatatatataaaagtgtatatatataagcatatatatataatataaagagggttgctgttattattttgaacaattattttctattatatcaactaagaataagaaaattaaagttttcattttaccttaaccaattcttctttgctgctttccctttctttatgtagatccaagtttctgatctatatcattttccttctcttttacaggttttcaacatttcttgcaaggcaggtctacttgcaacacattccttcagtttttgtttgtctgagaaagtctttacttctctttcacatttaaaagataattccatagggtgcagaagtctagtttgatgttttttttaaccaacacttttaatatttccctctactctcttcttgcttgcatggtttctgagaagcttgatgtaattcttatctttgctcctgtataggtatctccccaccccctgtttttttttttcaagatttgttcttgaatatattctaggtgtagttgttttggcacttaacctgggtagtgttctttgatcttgctagatctgtggtttggtgtctgacattaatttgggggaaatttccagtcattattttctcctcaagatatttgtattcctttctctttttctgatattgtcattttaagcttgtttacaccttttttagttgttccacagttcttggatattctgttctatctttttccagtgttctttttgcttttcatttgtgattttctactgacatatcttcaagctcagagattccttcatctgtgagctatgtccagtctactaatgagcttatcaaattatctctagcctttcactttggattgtttattagaagttctatctctctgcttacattgcccatctgtccttacatgttgtctactttatctgttggaactcttaccatattaattgtagtcattttaaattcatggtttgataatctcaacatctctgccatatctacatctgggtccaatgcttgcactgtctcttcaaacctcgtttttgttttgttttgttttgttttgttttagtatgccatctaattcttttttcatacttggacatgatgtattggttaagtggaactgtagtaataggccttctgtgacgtgatgataaggtgtgaagtggaaggaaagcaatctacggttttatgattaggtctcagcactatagtgagcctatccctctgacctgtgaacttcacagagcaccacaattctccccaacctctacacgtttgctgggaacaaatatttacagttaacccgagtttgatatttcccttctgtcagatcagttagtctgttacaaaaactccattatttcaggctctggtaaaatagtttcctttgaaagcaggacttgttaaaaacaaagtcctctggcatatttcgaaatggttattttcaccctctcctattagaagtatgaaaggatttttctctgatactcaccaagagaatccggtggagcatttgagaggagcatttacaaaagtgtagctgagtgggtttctatgactaccccatcccaaaagtgattaacactcagatttgtccactctgagtctagcaattccagaaacttgtcatttacggttcaggttttcctctcctggtaatgattccctcgtaaatgtctgctcaggggtttccactctaacaagttgtgattttctgtgtttgcctgtctccctgattttaagcacagtagtttgcctagctgtaatggatctaagagttgttgattgttcaattggttcaggtttttacttgctaagacagagcaatgacttccaagctctctatatgctggaccacaaactggaagttcatttctatatgaatttgaagatcagcttgttagtatatgcaaaagggcacctcgaattttataaatattacatttaaactgtaaatgaatttaaagaatatggtatcttaattccaatccataaatacaggatgtcttttcactttttaggtttcctttagtttctttcaatgatgttttatagatttcagtgcacttttttttaaatttattcataaatgttttattctttttgatagtattgtaactggaatgactttaattttattttcattgagaatattttcttctatttgtacctctgttgagtatttttatcatgcagcgtgttgagtttagtcaactgctttttttggcctcactaaaggtgatcatgtgttttttgccctttattgatatgctgtttcattggttgatttttgtatgttgaactaaccttgcatacctgtgataatttccgcttgctcacggtgttaaaactatttgtatgtgttgctggattcagtctgtaaatattttgttgaggacattttatctatatttaaaggaatgtcagtttgtagttttcttttcttgtgatgttattggttttggaatcagaaaaatgctggtcttatagaacgagttgggaagtattcctttctcttctaattttagaagggtctatgaaggattggtgttaattcttccattaacatttgatataactcattggataagccatctagtcctgagattttctttatgagaagttttttcttactaatttaatctcttgttataggtatattcagatatgatctttcttcttgagtcagctttggtaatttgtacatctcatgaatttgtccatttcatctaggttatctaattttttgtatataattttttataatattatcttataattcttatttttataattactaaaatttctaacttgagtcttccgtcttattttctgggtcagtctcactagagatttgttagttttgttgatcttttcaaagactcaacttttggtctcattgatttctttcattttttttctccctattctctgtttcactatttttactccaatctttattctttcccccctttgctagctttttggtgtactttgctcttctttttctagcttactaaagtggaagattaggttgtttatttgatttttttaaaataggtatttatagatgtcatttttctcaaagcactgcctttttttttttttttttggttctgtggggacaaagtgcctgaagtttacctctatacacagcagaatgtgggttcagtttcatagcagcaataattggttgggaaaggctttgcagctttctatgaaggcaagtcacatgggattttatttatttatttatttataaaaacagaaatgtatttccacagttctggaggctaaacatacaagatcagggtgctatgcatggttgtgttctggtgaggacctcttctaggttgcagattgctgttttctttttgtatcctcacacagcagaaagaggaggtaagagctctctggggtctcttttacaagggttctaatcccattcatgaggactccatcctcaagatttacttacctctcaaagactccacctcctaatactatcaattgggaattaggatttcagcataagaatttggggggaacacaaacattcagttcctaacagatttttttaatgtaatttatgtaatcattttcttacttttaggcatttagattgttttctacctctgcagtaaataatactatagtagtgagcattaaaaatatataaacctgtgtcattttttcccctatatatttccttaggctttatgaatgactaagtcaaaaagtgcaggtatttttaggttctgaatatacagctttcctgaaagattgtactgcttcacactcatatcaattttctcactatactcttgccaccatttagaataaccttttttatttcttttagtcttattaacttggtaaaataattatgtctcattgctttacttttcatttatttgactataatgaaacttttaaaaaggaaaatgatagcatgtttctaatggatagtgtgttcaaatattgacagtttgtaaatattattcacaaagatgcgtctgactcctttgtctaagatttggggccaaatctgtaggtggtggtcatgtgaattctgggaatgcaatgtgtttttttaaagggacttctttctagtgtattgtctttagaagcatcttttgaaatttttttgaagctcccctttttttcacaggttctcgaaccttgagacagtaaatcagtattataatcacagctaacgtttactgagtacttacaattatttgctaggtgtcttgccaagcactctacttgtattagctcacttaatgttcataaccaccctataagatgtacaaagcttttatttacattttacaaatggggattcttgagtacatagagattaagatatttggtcaaagttacaaagttagtaagcagcagtacctggatctgtactcagacattccggctctaaagccatactcttaggtactctgattcctggcaagattactgactttgggatggttttcttctaaacatgtaatctggtttaaattttttaaaaaattttagattcaaggggtacatgtacaggtttattatgtggatatactgcatgatgctgaggtttgggtttcaattgaaactttcacccaggtagtgagcatagtacccaattggtagtttttcaactctttctcacctccatctgtcccccttttggagtacccaaaaggactgtctatttggagtgtctatttttcccatccttatgtccacgtgcacccaatgtttagctcccacttataagtcagaacatgtagtgtttggttttctatttctacattaattcacttaggataatggcctccagtttcatccatgttgctgcaaaagacaggattttgttgtttttttatggctgcatagtattccatgctgtatatgtactacattttctttattcagtccactattgatgtgcacctagattgattccatgtctttgctattatatggtgctacaataaacatggaagtgtagacatcttttcgatagaatgatttattatccttcgggtatatactgagtaatggaattgctggatagaatactaattctatttatagttctttgagaaatctccaaactgctttccatagtggctaaactaatttacaatcccaccaacaatatgtaggcatttccttttctctgcaaccttgctaatgtctgtgactttctttttttctttttttcttttttaagatggagtctcactctgtcagccagctggagtgcagtggcgtgatctcagctcactgcaacctctgccttctggttcaagcgattctcctgcctcagcctcctgagtagctggaactattggtgcctgcaaccacacccagctaatttttgtattttcaatagagatggggttttaccatgttggccaggatggtctcaatctcctgacatcatgatccacccacctcggcctctgaaagtgttgggattacaggcgtgaggcagcaggcctggccttgacattttaataatagtcattctgactagtgtgagatggtatctcattgtgattttgatttgcatttctctgatgtttagtgataccgaacacttttttttatgtttgttggccacttgtatgtgtttttttgagaagtgtatatttatgtcctttgcatactttttaatggggctgcttgttttttttcttgttgaattgtttgagcttcttataaattcaggatatttgtaccttgttggatgcatagtttgcaaatattttctcccattccgtaggttgtctgtttgctctgttgatagtttcttttgctgtgcagtaggtctttagtttaattagttaccaattttcactttttgtttttgttgcaattgcttttgaagacttaattcttaattctttgtcaaggccaatgtccagaagagtatttcctaggtttttgcttatggtaagagatagaggttcagtttcactcttctgcatatagctagccagttttcctagcaccatttattcaataaggtatccttttcccacagtttctttttgtcaactctgtcaaagattagttggttgtaggtatatagctttatatttgggttctatttttctaccagtaccaagctgttttggttactgtggctttgtagtacagtttgaagtcaggtaatgtaatctagcttctgtttttgttctttttcttaggattgctttggctatttgggctcttttttggttccatatgaattttagaatagttttttctaaacttatgattttaattttagaaaaattaaatttataaattaattttctaaaattaattatgtgaaaaatgatgttgataatttgataggaattgcactaaatctgcagatcatgttgggtagcatggacattttgatgatatttcttcttccaatttatgagcatggaatgtttttccatttgtttgtaatttctttcagcagtgttttatagttctctttgcagagatctttcacatgctaggttaggtgtattcttaggtattttattttattttgtggctattgtaaatgggattgtattcttgatttagttctcagcttgaacattattggtgtatagaaatgctactaatttttgtaccttgattgtataccctgatactttactgaagttgtttgtcagctctaggagttatttggtgaaatgtttcaggttttctagatatagaatcacattgtcggtcaagagagaaaatctgacttcttttttcctatttgacaaacttttatttttttctcttgtctgattgctctggctgaagctcccagtactatgtcgaataggagtgatgaaagtgaacatctttgtcttgttccagttattaggggaatgtttccatcttttgctcattcagtataatgttgactgtggatttgtcatagatggctcttgttattttgaattgtgttcctttgatgcccagtttgttaagcgtttttaacatgtggggatttgggactttattgaatgctttttctatgtctattgagatgaccatatattttttgcttttaattctgtttatgtggttaatcaatttattgatttgcatatgttgaaccatccttgtatctcattaataaagcccaattgatagtgatggattatctttttgaagtactactggatttggtttgctagcattttgttgaggatttttgcatctatgttaattggggatattggcttatagttttattttgttgttgtatttgctagattttgatatcaggatgatactggttttatagaacgagtcaagaaggaatctcttctctatttttcagaatagtttcagcaggattggtaccatctcttctttgtacatctgatagaattaagctgtgaatccatctgttgaaggtcttttttggttggtaagtttttatattgctgattcaatttcatagtttattattggtatgttcaggatttcaatttccttctggttcaatcttgggaggttgtgtgtttccaggaatttgtccattttatctaaattttccagtttgtgtgcatagagatggttgcaggatcttttgtcactgaggatcttttgtatttctgtgggattggttgtaatgtcacctttgtcatttctgattggcttatttagatctctcttttttctttgtcaatctagctagtggtctatcaatcttgtttctctttcaaaaaacaatttttcattttgttgatcctttgtatgttttgggggggcctcaattttgtttagttctgctgttattttagtaatttcttttcttctgctaagtttggattcagttcttgttttttttttttttttttagttcctttaggtgtaacattaggttgttaatttgagatctttatatcttcttgatatacgtgtttatcgctatatgctataaacttttctcctaacactgtttttgctgcatctcagaggttttgatacattttgcctctatttaaatttgtttcaaatacttttctgtcttatatttttgtttacccaaaagtcattcagaagcaatttgtttagtttccatgtacttgtatagtttggagagttcctcttgatattgatttctaattctgttcaactgcagtctgagctggtataattacatttttttttaatttgtagagacttgctttaggaccaagcatatagtcaatcttagagtatgttctgtgtctgagcactgtttaagttacatctcatacattttgatttgttgcatttgtttgtattttcatctcaacatattttttaaattttttttctgatttcttctttggcccatttatttatcagtgtttaattttcatggatttgtgaatttccctcattttccttctgatattgattcctagtgtcagtctattctggttggagaatgtgtttagcattatttcaatctttttctttttgtgtgtgtgtgtcttttgtttttctggaggatgtctaatatatggtctggcctgtggaatgtttcatgtacacttttgaagaatatattttttctgccattcttgggtagactcttctatagatgtctactaggtagagtttgtttatagtgtcgttaaagtattaaagtaatttatttccttgttgatcttcatcctagttgttctatccattattgaaagtaggctataagggtctccaactattatttttgaccatttctctattcaatcccatgagcttttgcttcatgtattttgaaactctcttgttaggcacatatatgtttggaataattatattttcttgatggatcgacacttttatcattataaaatgtcctttgtctttagtaataactcttttttttttttttttttttagacggagtctcgctctgtcgcccaggccagactgcggactgcagtggcgcaatctcggctcactgcaagctccgcttcccgggttcacgccattctcctgcctcagcctcccgagtagctgggactacaggcgcccgccaccgcgcccggctaattttttgtatttttagtagagacggggtttcaccttgttagccaggatggtctcgatctcctgacctcatgatccacccgcctcggcctcccaaagtgctgggattacaggcgtgagccaccgcgcccggccctttagtaataactcttaaagtctgtttgattgatgttttttaagccactcaggtctctcttggttactgtttgcatggttcattgtttcccatcttttcactctctgcttatttatgtcttttaacctaaagtgtggcccttgtagatagtatatactggaatcttacatttttgtttatccattctgcaaatctctgcatttggcttgaagttttaaatcaattcccatataatgtaagtattgataaggtaggatttacagttgccatttgttatttgtcttctatatgttttatgtcatttttggtcctctatttttccattgttagtttattttgtgttaagtagaaattttcatagcatatcattttaattctattgtcatttattttactagtttttaaagttactttaaactggggatcacaaagaacatcttaccactgtatttccaaccttaattataagagtgtacacaaattttactctgacataactccatttcctttccctcttctatgctgttattgtcatcaagattacatctttatacatagtatacccatcagcacagatttgtaattatagcttcacgcaatagtctttaaaattagatagtataaaaagttgcaaataaaaatataattacattaatttatatttatccatgtagttacctttaccagtgttatttatttcttcatgtagatttgagttgctctctagtgtccagtcatttcaggccgaaggactcccttcagtatatctttatttaaaaaatggattttattgtgtatatttgaggtttacaacatgatgtatgggttacatataaatagtaaaaagcttactatagtgaagcaaattaacatatatatcaactcatgtagttactttttattgtaacaagagcggctaaaaatctacttatttaacaaaaatcccaaatacaatgcaattttattaatgatagttctcatgttggacatgaaatctgacttgtttatcccacatatctgctactttgtatccttcgacctatatcttctcatttcctcccctctttgaccagtaaataattgttttactccctatctctgtatatttaaatttttaagaagattccacatgtaagtgagatcatgcgatatgtttctttctgtgtttggctaatttcacttagccaaatgtcctccagattcacctacattgtggcaaatagcaggagccctctttttaatgctgaatgatattcctgtgtgtgtgtgtgtctttgtgttgacaagacaggtttgtttatctattcatctgttgacgagtctgcaagttctgctttcaaaaaatatggaaatgtctaatatcttctttaattttgaagaatagctttactggtgcagaattcttggttgatggttcttttctttcagcactgtgaacacgtcatttcactgccttctaaatttcatggtttctgatgagaagtcagctgttaacactattaagcctccattgtatataaagaatctcttaattattgctgctttcaatattctctctgtatttcaacactttgatttaaatgtgtctagatatggatctctttatattacttgaagtttactgggcttcttgggtgcataatgttttaatcaaagttgggacgtttgggggctttatatctttaaatattcttcccagttatttctctgttctccatttgaggctcctatgatacatatgttgcatcacacgtatgaggctctattcatttttattcattctcttttctttttctttttcaaactacacagtctcaattgatctgtcttcaaatttgctgatattttcttccgcctgctcagatctgctgctgaaaacctccagtgaatttcttatttcagttattgcactcatcaacttcagaatttctatttgtcttatttttaaaagcagtttctatctctttattgaaagtttctattttgtaagacatttaaagacatggtttctttaattcttcaaacatatttaaaatagttgatttaaaatctttgtctagactacacattgggtacagtgtacactgctcaggtgatgggtaaccaaaatctcagaaaacaccacttaaaaacttattcatgtaaccaaacactacctgttccccaaaaacctactgaaataaaaaaaataaaagtaaagtatttgtctagtgtgtccaatatctgggcttcctcagacactgtatgttaacttctggtagttgttgttatgggttatactttcttgtttctttacatgtctaaaaatttttaattgacaactgaacatctccagtaacataacatgacaagtctgaaaatcatattcttcctcttccttagggtttgctgttgttgctattaatacaacctgggccaggcatggtggctcatgcctataatcccagcactttgggaggctgatgcaggagtattgcttgaggccaggagttcaagatcagcctagcaagatcctgtctctacaaagaatgaaaaaagaaaatacaacctgtagaggggcccttctgttttcctctccccattcctcgttgttcattgtttgagcacagctctcttttctagttgtcattcaatgcttcagaaaaatggcaaataactatttacatgacagttgaataccgcagtaatcattgttgcagataagattcatcaatggatgttaaaattagcgggtgaaattttgaagagaaacaaaatttgcatagcttcaaagtacctttcccaaaatattaactccatgttatcaaggttagcacgaataataagacatattgacatcagaaatcccatggtatgaggcaatgagaaggacatggcataattccattaccatgatgcataacctcatccagataatgagaacatattagacaaaactaaattgaggggcatttgtgaaataaatcattcgtactcaaaagtgtcaaagtcatgaaagtaaggaaagactggggaaaaatttatgaaacttgaataagttctgtagtttatttagtactattgttgctacgttaatttgtagctctcgttattttaccatccatacacaaagtgataacattaggatgagatccatgaagggcctcttgggattctctgtactatttttatgacttctgtaaggccaaaattagctcaaaataaaaagttaaacaaaaatggttgtacccaaggcgggaggaccacttcaggtcgggagttctagatcagcctggccaacatagtgaaactgcatctctactaaaaatacaaaaattagccagacgtggtggcacatgcccttagtctcagctacttgggagactgaggcaggggaatggcttgaatctaggaggcggaggttgcagtgagccaagattgtgccacttcactccaacctgggcaacagagcaaggctctgtctcaaaaaaaaaaaaaaagttatatctactttttagcatctcaaaggaataatttttattcgtttaataatttttgtcatcttactcaaaaacttgatatttttggacatggtattttaatgagaacatgactaatgccgactatgggtaggaacactttgaaaaaataaaaatgatttcaccaagatatgctcaaattctcatgatacttattcatcagagtttaagttataccctgttttgtgtttaaaatgcattatgcactggtgttgttgaactaacatagtttacaatgatgtgggatttaacgtcgaaatttttcttttcaatattatatggaatagggtgtgttgctattctcagctaaatgtttgatgctgtagctggaattcttattccttggagactttagaagctattgcttgtagactactttaaatgcttaaacgttgggaatttggttcttgtggttttccatatttaagaggtgtttaaaagcaaatgaaacgtggaaagttgaaaaaatgaaaaggtatgtgtaatcgtgagtgctgtaacatatagttagctatgaatacgggtagttatgaattcctagtcatctcatctatgaggaaatatcaaccaaatctatgcttttcaatctgtgcattttgttaaaatgcaagttctaatgcagtggtcccaggagtctacctttctaactaactcccaggtcatgccaccaactcctagtgcctgctggtccagggacaacatttggagtaccaagaacttaaatgattggaaagaaaatgctatgcatgagtcctgtctatttctggcataaactttcaaagaaagggacttaatttttaaaaagtgaaatatttaagtacctaaaggaactctttgagaaactcttgccagtgaaacaaactcgggagacaggaagagctgcatgcgacacaccagtcatcttaatgtcacatgtcacctgactggaaatgtggaaagaaatgaggctgtgaagtcaaagattaagctgaaccagtcaagggcaggtaggaaacacatctcaggcacacagaaatcccccagcaggagaattaccgctgccaccagggggcgcaccgccacagcgatcctaggaagagcatctggacccaatcattctgcagttctggggctggaaacctgggcgatgaactgagatgaggagatggacacagcactgtataacgtgagaccatcccattagcctcaggtctctctgaggatgacgacttggtgatgggtcatgtgtttaccactcaagtttttgcactggacagctgagctgggcttgaagtggattccgcagtcagatttgaggccctgggcaagaggggtttgctgtgattatccccatcagaataacacagggctgtctaaagtacaaagagccaactgactttggcatctctctcatctgaatgttttgtattttcaaaatgcttcattgccgcaaagcacccttctgtggaaaggttggcatcatcttttaccattgaggaaactgaggcacaggggaggaatggactatactttagatctgtggccaaatcagaatcagaattccagcttcttgctccagccgtagcagaccacctggctgggctgcctttcccctgtcatctcagggctcctccgaatgagcctcgggcacagagctgccagccatggcagggaggagcagctccttggaagccaggcctggaggcccagcctagcctcatgctcaaccctgccaaagtcaaaccatttcaattcctttcatttaagtcaacttgccttaactgcttacacatgagcagattcttttaatttttctttatttttttaattaataaaattggacatactgatggaagaaaaataattttaaagctatggaagagtataaaataaaaagtgaaagtccctctacattctctgatccccaaccccaaatcctgtaatcccacatcccaaagtaatcagagatagagagagagagatgattttgcttaactttacaaaaatgggattatacaattcatagtgtagcttctttttttttccacttaagatgtactgcatatcatggtctaccaggatgaagttttgaaatttcaaaatgctaaaacattttttagatctattgtcttgatttaaaatataggatacctaagcctaatatttgtatattaacaaaaataagccctcagggctctccccaggctcctctgccacactcagcaccttgtctgcccaagtttacgagggcaaaattaaattagtggcatgtatgtgttttctttctgaatgatcctgacagaatgaacaaattcctcaaattgtgaatacttaatgtttgtcctctgtggatttaaaattttaatctctttattatttatgtggttctgaattatttcttacaggagtctttaagaaacatagtactcaagtgaaaaatgaaatacatatagacatagctacaggttgtgttttcatactctgtctttatttcttccaaacaccccaaacaagtcaatttaaaatatcaacaaataggtgctgggcggtatattttttgctttttagacttgccctccaggatttaccaaaaaatacatgccaagctgtccctttctctgaaacagcaggtctcaaatcttaatatgaaaggatacctgggaccttgtaaatagggcagattgttgggcttcctgagtcccacatcctcaggataggttgggaatgcaccttactaacaagctcccacatactttttctgcccagcagaaaggaatttgattgacaggatcctccatgagtttgtcatggcctgggtgtgactctttcctgatggaacctattctactttcctctcatttagagaaaaaggaaatgggttgtactgacttttgccattaaaagctgcctcaaggtctaacgcacattgcaggaatttttctgtgcttgtctttgacagcttggccccctgaagtttcccagtggacctgttgtcctgcagtttcccttgggctcctccttatgtagtgtagctggtttgagaagcagctgatgactgtttcaatttcaactgaagttccttacaaaactagccaatctgggaggtcatttgtctctgatccagatgtagtggtttgattattcttggcttatactaaagttggaagggaactgaagcatcaggtgaaaaccacctacaccttcacagtgtgaaaaagaacaaatcacagctatgcacaccacaatggacagacatcacaaaaacgaagatgggcaaaaggagcctccctttatctgaggttcaaggacaggcaacaatgatctagggtacagggttgggaagaggcactatctctggggaattattgcctggtgaggggctggcacagggagactttcagggagagcaggaaatgttccatgtcttggtctggaacctgtgaggatgtatacgtatatacagagtcattgagttaatgcttaagctgtgtgcgttttgcctcatgtatgttatacttcaacacattttcttttttttttttttttcttctgagacagagtctcgctctgccacccaggctggagtgcagtgtcgtgatctcggctcactgcaacctccaccttccgggttcaagagagtctcctgccttagcctcctgagtagctgggattacaggcatgcgccaccctgcctggctaatttttgtatttttagtagagacggagtttcaccatgttggccaggttggcctcgaacttctgacctcagatgatccacctgcttcagcctcctaaagtgttgggattacaggcgtgagccaccgtgcccagccaacaaattttttttaaaggcaattgtgaatctgaccatggtcaactaggaaaaaaaaatctatagtcatattcatgtggtgagttaaaaaccaaacaaatgcacacagttcagcaaaaagaatattcaaaattaaaaactcttataaaataagcagtctatttgaactccagtcataaactgatcaccaaaaataacgtgagcccaccttgcagacacaatgctctcaaaagagtaatttttttttttttgtccttcaaaatacagccggctcagaaagtgtctgaagaagcagttttcctggctttttgataaagacggtggacaagaatgggcgtgagaagaaatagttgttaggtcttccttagtaaggatgggcttttgtccaagtctatgtgactgtgcaggtgcaggggttttgtctggaggtgatcagtgctatcagtctaatgtcttcctgggctacatttgagtgaggcaatgacaggaagcctggcccttcaagtcctaggcaagaaggggatgctgcatacaaggcctgttctaggcatactccatgaatttctcccttttatcccccatctactaacatttggtctcactgtgcttaaaggttttccatgaacacccaggggtctttcccctctgagcttgggccaggtctccttgtgttatgaaacagccatggtgagaaagctgatgtctctttaccaagaaagtgccttttctggttttctcttcctctctcctcctctcttctaaatcaatggcttgcctgccacacctgggaatgtttggtgttgtggagacataaccttgctttgtcctggaaactactccatgaggtctgtgagctgtggtcagcaggaggctggagagctggaaatatcacaggagggcaccgagctgcacctagtttggccacagacgaggtccctttcactggctggtggatgatctggcctgggctgagagttagtgaatatagtcacgggaggctttctattctttgtcctaaaggtagaactgtgagaaagactaaccaactttattcaccacatcaggtccaaagtctctgcagggacctgaaaacagaatgtttatggaaggtcaaaacagggggagtagacagtgaccccagaacccagcccaaggtggggaggtgctctgtaaagacacctgtcttattcctgaaagggtgaagacccccacacatctaggagtgatgcctctctctccaggaaagaaatactctcagactgaagtatcagagcacattcttcatttcaactcttgctcctttcacagttcggtttctggagggagcttccaaagactgaaagggacaggtaggaaaaaaaatgactgttttctttggagaggagctcctgaggcctgtctcacttggccatcacctggggggctgaggaacctatcaggtctcagttgctgtcagcctagggaccaggatccccacctttcttccctaggtggtgcctggccgcccaaggaatcactctctgtgctttactttaacagtgcccttcactccaaaatctgtcaaaatgaatagaaacccaagaatcatttctgtgtgccacaggagtgctctcccccggcccccccgccccaccccgccacacacacacacatacactcctggtgctgagataatttccaagaaattaccagttcctggttattctccttcctcctggctcccttcctaactccccctccatcaccagattacacaattccttgagcctatggtattttcccctggagcttgtgttcatttcctaactcaattaattccagattccctctctcaccttctattttccctcgttttcactagaaaacactatttgagtgactttcctggttagttgaattcttctcagctcctaaactttcttttctgtgtctgcaaaagcttgatggagataacacaactagagaattctccccacacactccagcacggatgaactcgtatttttacaccctccttagtatctgcagccaaagcaaagggaaaaccactcaggcattgtgggggaggtactctgagtgtctggaagatgccaggctgagaacagcagtcataaatgatatacccacaaaggaaaagtctctggtctccctgggtgagatggcctttctctggaaaggaggccacctataaccacttcctttgccctttgctgtgaccttgctgtccccgggcgctgtcagggattgtctgggaggaggtcggggggggtaggtcagtcacaggtggggacacatttgaacagacctagacaggggagccttatacagaggttctctgcttccttcccacctccttagggtatgaagctagattccctgatctgaatggattccatggagacagtcacctagacagacacctggtttcaggtgatccctttctggacaaggtcttttgttttcagcgcccccccaccctccgccccaacaatggcatctcctcctcagcccagccagcagccccaggctagcatctgggaagagtccagggaagcccaatgagggagagtgggctgtgtctgggatggccagggatcccctccaaatgggcacctgcggcaggtcgtgagtccagccatctctagggcagcccacaccttcagcaaggaggggcaggagacctagaatgggggaaatgggaggactaagattctaacgttggaggtagggcaggctggtgttacctgcacaaggccagaagcctcttcaggccgcctctccagggaccgtgccagctgtccccacttcgatcagccacagtattggacttggtccagcacgaacagaaagcgaagtgtgagcccaagacagaggggggagccggacacccttatggaactaacagcctctggggaggcctgttccagatcccgagtcgggcgcacagggggatccccgcaagggggcagagggaaacccgggaggcccgcgagaagaggcgaggccagaggctgggcgcgggcagccaagcgcactcgcggcgccccgactccaggtagcacgtagagaggaggctgaagagcccctcggttttccgaaagtttccagcgaatccttcttggtgaagatcggcctctgggaggcagcgtgtgtgcttcccgagagggggccccctgcgccgtccctcttcccctggcacagaagggttgaaggactgcacacagggatccctccccagcccagtctcctcccagcgcgccccctccccgccatgccggccagcgccgggctgtgtcccaggcactgccccccgccaaccctggcccgaccagcctcgccgctgcaggctgccgggagctgcgctagctcatgctcccagctcgctcggtgctccctgttcgctccggcccggccccggcccccatcgcgccgaccatggaataggcgggcggccccgcgaggcgctcctgcagccggcgaggccagagccagtccggggtggctttgccaaccggcggagttggccagcggcgggccctcctaccgtcggtccttccccgctcctcctcctctgccccctccgcccccgcctcccggccgcccccgccgcccccgccgcgccgccgccccaggccgagcgcgggcgcggagcgtgggagccatggcgcgcgaggaggagcgggaccccgagcgccgggaggcggcggcgcgggcgagcggcgaggaggaggaggagggaggggaggagggactgggcgatagcgacgaggagggcgacgacgaggagacgggcagcggcgaggaggaggaagaggaggcggaggcggcggccgggtgggagcgcagcgaggacgcgcggctgctgcgcgcagggctgcctcctgccgctgtccccgccgcggccgcccgcgacaggagcggccgccgcccgccgaggccgccgcccggccgcccgaggatgcggccgtccggcgacgaggaccgcgcgcgtcgccgccgccgccgccgccgccggagggaccttctgctgagccagctctgcttcctggcctcggtggcgctgctgctctggtcgctgtcgagcctgcgagagcagaagggtgagtgcacgctgcctgccccgagtgggcgctgcggctccggcggctcggggctcccggggctgggcgcggggctccttcgggcggcccggccggagccccaggataagcgggctgggttggcggggggagtgggatgccaggcacgaggactccccctgccccacgcagaggcatggaggtggggaccctgagcgccagcagccagcaggcttaggcgtctggccgccctgggaacatttacctgtgcccgcctgtgcgctgcttactcgcgagctggaggtactgctggtggcggtggtggggagtcttactctccatcagcccccaaggccagggataaagttgtggtggtagacccggcacctgtgcaggtgaccacctgtatactccttggcttgctgaaggattcaaggggactgcttaacacacagttgtccgtatgttctccatccagagagcaggcgggatggcccgagtagagagctcttcaaccccctttcagaacaggtgccgggaacttcagggagagaaaaagtgttggccctccagctatgggctagtaggggacttgttctcctaaaatgaccactcactgggaagacagggaattcttcctcagaggtcccttttgcagagctgctgctgtggaagaaatggtttgcagtggaccacgcatcacactgtccgctcctctaccggtgctctgcgcaaagtctgccctttaacccacaacttttgtcttgtctttgtccttggcctttcttgagctgaaatagatcttgtgtgctcccaacagttgtctgctgaaacagcttcgatcctgggattcagctgtctataaaatgaaggaaaaacatgggagaataactgttgtaaaatggttttatatcccggccgtggaagtggcacgattagtgggaaaacagccatgtaaagggttgtgagaaagaaacaaaacaaaacaaaacaaacaaacaaaaaaacagttacaagtatgtgctgtggtgttgaggtcgacgtagctctaatgcaagatgtcatgaggtgcagaataaagacattttgatagtcaccgtaaaatattttcaaaggtgccatgaatttaaaaagggatctcccccagcttggctggtctcctgcttggtggggaagtgaaacaggcgtcagtcttcattcagtcttagcagaccgcttgacagacttcatcatttatggtaatagcagagagtccgtcttggtcttcagtgaagctgttcaagactccacggctctctccattgctctcctggatctcagatcccgtagccttgggttctgacatcaggaagggggccgtgccggtgtgagggaagcagaatctctcccagggcagattcacatctgccagacttctgtctactgacagtctcactaagggggttttcccgaatcccatttttattttccttttttatttttctccagtgaaaaaccagtttatagttcatgccacctttggaaagggctattcctagtggattacacgctggccatttttttctggtatgttggggctctatgagacatagagttcccaccactttcaagaatataaaagacatttttttctgggtgaaggatgtgactcatatagttaagtcaatcagtgacagggggctgcctgggccctgaaaagctgggatttgggaggagaggaggccagacactctgcaaacttgaaacctggggactggaatgtcattttggaatggtttccctggtagtgacatttctattcaggtgccactgactcagatttagttccatagcacggccttttccgcatccctccctctgtcctacctttctccttcctacctttcatattcttttttcctctcacttcctcttcctcccttctcatctctgttggtcttaggacccctccacaccccagtaactgaagatctaacaggcaaaagccaaatgttaaggaggatgccagccagcctccctgtgttgcccccgaatgacatatgagttgaaatggtctccaatcacttttttttccgttaggtattgatgattttggtatgtgatgcacagtagtattttgcagcaagacacaggtttttctagataatttttaacatattaattaatgtgtgtgaatctgcaaatgataattttgcaaggggaattgtcgtttggcacacgtaagcatttgaatggtgacttttaccctggaaacttggagcacacactacctagtggtcctttggtacagatactgaagtttggaatggagcattgtttcgaagaccttgtggtgtagagaggctgagtgattagcttaaagtcacacagcattcgaagagtagaggaaaaaaccaacctgaggtaacctggttttttgttccctactctgtcctcatattcaaaccaccatttgggtgtagctttgtaatatttatataatctcatagggggtaccttcataatgatcaaaggtaatattttcatttagtcaccttgaaagccatgcagtgattgttaaatgtaacttctcagaagctcgttttctaacacatattgacctttccctccctccttccttctgttggcccttcctccctctctccttccttcattctttcttccttcctgctcccttcctttctctcttctttcctcttaaaatgacagttcttttaccaaagcaaaatagagatgtgtgataattatattatatgatgtttcataacatttctaatcatatggaatccaagatccctttctagacatctaacgaaactcagatttggctatgtactgaaaagttttggttatatactgaaaacattttccacatattcagtatttggttatatgcagtaagaatctacattgattcttttctgctgaggtgtaacatgaggtctgcttaatttaggtcaggaagaattagtgctggaatcaagaaattctaacaacaaaagcaataataataactggaattttggtgggctcttatgtgccaggcaatgcgctattcccaccttataggtattgctttatttaatctgcagacactcttttcggaggcatgagccttcagtggtggaaagcaatgagctctagttgccctatttagttgttatggatgaagatctcatttttgatctctgttttcaaagccaattaaaataaggtgttagatttgctgaggaggattttctttcctttttgcaatgagaatagattacttttgtgtattttgagtggtttaaaagtgttatatttttctttgacatgaactacccagccattttttttccagaagtagtgtggataaagcccagggattctaactgaggagtaattctagactttctctctagaaggttctcagggaggtcaatagtaattaagaaaaaatatacaccagcctaggcaacatagtaagaccccatctcttaaaaaattttttttaattagctgggtgtggtggtgcattcctgtaatcccagctactcagagtctcaggcagcaggattgtttgagcccagaagactgaggttgcagtgagccatcattgtaccactgtaccccagcctgggcaacagagtgagaccctgtctcaaaaacagaaaaaaaggaaaaaaagaaaaaaattacacacacatgcatgtacatatacacacacatatgtacatatacctatgtgcatgaatgtatgtatgtatttatgtatatactttgagctactttctatactagttgctattgctgcataacaagtcaccccaaaagttagtggtgtaaaacagccacttaattttttttgcttatggatactttgggtcaggaatttggatgggggtaatggggctggcttgtctctgctccactacatctggtacctcagctggaaagattgcaaagctgggtggcttgacagctgcatctggagtcatctgaagcaacacctctcccatgcctggggtcgatgtggctcttcactggaccctcagagctgggctgccaaccagaacacccacacgtggcctctccatgcgatctctttatgtggctcactttgaactccctgagagcatgacatctgggtcgcaagggcggatatcccaaaaggacaaggtgaaagatggcatgtttatatcctagcctcataagtcacagtcacagaatgtcattttcgctattttctgttagtcaaagcagcgttagatgtcagcccacgttgaaggagaagggcatagataccagcagtcattcagtggaggagtgtagggtcacattataagagcctctgctgtgggagatactgctgtgtctgcctttttaaaaacccaaggatctgaagggatcataacttggtagtgaatgtagacatttcccaaggtggctaaggtgaatgccacatatgcatacatacaaacatatatagacaaacatacacacagacgtatgtatgtatgcatatattatctttgaaatatcttccattcatgaaaatattgctgcttattttagctggtgtggggtctagaagtggtatttgaaaaggaggttgcagtgggtatttgaactgcaaatttaaattgcagagctgagagcccgtctttgcctttgtggctgccgattcctcctatggcaaatgaccacagctgttgaatccttcttatggctcagtgtgaggactgctggaatctccagctttgtttccctcttctatttccatgcatccccactctggtttttcctctgctcctcaaaaggtctatgattcttccgatctcagattcctggcgcttgctggtcccactgtctggactgctttgtccaccatggctagtgaattcctcactacctggctcgagatcttcctgaatagactgggtccctccatttctctgaatacaccatatgttcccttcatagcatttatcacagttggtaattatgtgtttatttggtcatgatttgggtgatatctcctcttccccagattctagggtccaggaggtcagggaccctatgaactttccgtacctctgtaccccagtcactggccccatagtaggagctcagaagatatataaatatcttaaatatagaggcaaatataaaaggtatttggtaaataaagacgctcttttgatcgctgaactacagtgcctgtgataaaagtagtcatcctgtgttaggagcccatcagctgacatggattttattgtcatgatttattaggttggcgcaaaactaactgcaggttttgccattgataatagaattctgctctcagtccagcagattcgatatcattacccatttctcatgggatagcactgagctgaagaaaggtggagtgcagtgcctagtgtctgttaagtggagggatttgaacccaagtccacctacatcagggctgcatgctgctgcgttttccagcctctgtggaggaggacatgaatagaagacggggaatcaccctgcctttttcagttaactgaggagtaaggagtaacagaaggttggtttcatagaagcagtattttagaaacacattgcttttcaaccttttctattttttgcataaacatatatagatatgtctctttcctcttggcttttcttagcttctcatcaacccagatttttctcaaagatttcctccacttgcaagcctcaaatccttgtgggaagctttttttttttttcttcaccctggagggttggtgaagctaaaagaattgcaaaactagatatttgctgaaaattccaaggcctggtggaagatggctgataggacaaaattttggcaattttctttttctgtatggaggtttcttttccttgagtgaaagaactttttggaggaataatagtacacagactttcataatggggaaactgaggtatggggtggttagaaaatgttcccaaagttgcaaagcaaatgggttatgctgccaggaaggtaatttggattttttttttctggtccatttttgccttctttttctatagagcttgtttggcaattatttatatttattgtttgcaatggtttcacaaatgggattatcctgtagcatttgagaatgtgaagtattaaggacccaaatggaagaaggttttgtatgaaccaagtggtgatgggcttcaggtttcctaggattccccctgctgttctcttcctgttccacttccaacctggagaggcaatgctccttgctgttgctagtcccggacggcccacactatcccttattggtttcccagccctactcttacccttgtaggctgttccttcatgaagctctctcagtgggatcccttgagggagttcctgcccggaccccagttgcgtaagacacggggaccttcacccatttgttcattcaacaaatggcaggctctttgctagttgctagggtggcagcgttgtcttcgagggacaccgtgatgttcatcctcgtggtgctcaagcttgagtgagaagagaggtgctgaacaagtaattttcatgaattatgagagatcgggatgagaaatacagcatggcatggaggaggctgtggtggtcaggaaaagctggaacctgaataataaagggaataagattgaggaagaatggaggatacaaaggcaaatgtagaaaaataggcaaaagatgcagacaggcaatttacaagaaaacaattgcagatggccaacagacacaaataacaaacttaatctcagttttaacatgaaaatcaaattaaaaataatgaaataccatttctcaatatcaggttggtagattaaagtaaattaaaacatgggctcacatcaagggtttgtacagattctggagacacagctgttctggttcacttcagaggaggttgtcagatggcactccagacactgcgggggaccatcatcaggggacctggttataggaatagaccccaaatgaagccttggccatttaatgcaattgacatgtagaaagggaggtgggtggattagaatggctatatgtagatatttgagacttgggtagaaactcatcttagctggacccatccatggaccatggagcatgttggtcatgaccttttcatgtttagttgcttaggtgggagctccaggaaacaaggaaagacctgtgtcattcctggaactgtctgaaccaataaacatcacttatttaaatcatgaaatctagtaatcgtttttggcttgtcaatagtgatttatttttaggagagagtgaacaaataaagtcagctcatctgtgacctaatttagggactttcacatttgcaacttttacatttggaatatttgcaacaaatatttctcttcctttctcctttgcatttctgcattgtttgatctcagcaaaagtcattttcactttagtcagccagtctgccatggaattgaacccacagaggacagagaaaggagcaggtttcttgattaggaccttgacaatagaacaaaaggggtgggataagggattggtgacctcaggaagtcgataatgccatgtttaagacagaacatgaaacatttatttttgaagatttggacttttagagcatctaggtggaatatagagctgacatttgaaagtcaaggtgataagcatttgtggctgcagataaagatgttggaatggtatgcatgagggtaaacattacatctatggttagctccgtgcttctcagtcttgtctgcacattgtaatcactttgggaactttaataattactcatatgtgagtcccacctcccagaaattctattgtcatgctcccagttgtggcctgggcattgggattttataaaaaagtaatacagttggtgccagtgtatctcagcagccagagctaagaaccaaagggttaaaggttattctttaccttatcacaagcacattttgctgttcgtcattgaggtacgaaatacactgtacttaaatttcctgtcctggatgtgaatatatgtgtttttctgcttcattttctaagccttcaccactaatttaaacttaaacttctctccagttgcctagatttccttttctttttagagacaggatcttgctgttgcctaggctggagtgtagtagcatgaacatagctcactgcagcctcaaactcctaggctcaagcaatcctcctgcctcagcctcctgagttgctgggattacaggtgcgagccctcacacctggctcttccatctcctctcaatatgtgcagggacactaagtattccagcacgtcttctttggaggaagtctttaccagattcctctggcctgctctgatctagacaggtcacttgtaaagtctgctgccagctgtcatcttcccattgcccttcagcttcatcctgcatatttcttttaactttcccttgggatgaaagccctgctccctggaacccaggtatgcgtctttcttagcttattcctgaaatttcagtgtacatttttgagggtcacagcctccaggtgcctcctacaatagggagtgtggaaagtaaagattcaagactgtatgtgctttaaaatatattccttctacctctacacttagaagatagttagactgggtcaagaatttaggttgaaactcatttgccttggaattctgaaggcattgcttgaatgtcttctagcttccattgttgcctctgagaaatctgctgctgtcttggttaatcattttcgaagcctgtatccaccccccgcctcaccccaagagcatgtctattctttgctttgctcctaatggtctattttttcctaatcttcaatcacgtcacaattatatgactggcgtgggtctgttttcattcattttcttggatctttcaccaggttctcttaaactggaagcttgtcttctttaggtctggaaacttcccttttataatattctccatcctaagtactcccttttctctttctggattgtctattatttgggtgtttgacttcctggattgaccttctaattttcttatctcttctctccaatttctctcatccttttgctctaatttctatagattttttttaaccatgtcttccaactcttatactgagtgtttaatttctgctgtcatatttttaatttccaagagctcttcttcctgtggaagctatttttagtagcatcctgttccgcttcagtggtacaatatcatctcccatatccctaagtagattcgtagtagtattgaggttttcttttccccatatggactcttttttcaagttgctgttgttcctttgttttgtcttgtttttcatattatacatgctttcttcagatgtcaggggatctttggcaactacttatatttaggtggtgctgtggaaaagatgactggaaattgtgcaaaggagggtcttgttgattgtatctctgttatgctatctaactgggctattttattgggcaatgcttcatatctcaagttttagatctctgtcagggggtggtcagttttcccagagaaagatcactcagcatcctgtcttgagggaaaagacctagttacttctgagaatccgataggagaggaatctgggaatggggaaggttttttcaacagaaacactcccctagactcaagatatattcagccctcacaactgtgagtaaggaagcactaaataatttatttagatatatagcaggaccatcccaaattatttaatccttccttccttccttccttccctccctccctccttcttccttccctcctccccttcccctccctcccttccttccttccttccttccttccttccttcgttccttccttccttccttctttccttcccttttaactactgtacacatgaatctggtaagagctactgcctcctggtagaactaatggtcagaagtaaagagaaggcttaatcttccccatacccctttttttaattgaaaaattttttagagaatttcagattcacacacagtcataagaagtaatacagagggccaggcacagtggctcatgcctgtaatcccagcactttgggaggccgaggtgggcggatcatctgaggtcaggagttcgagatcagcctgtccaacctggtgaaaccctgtctctactaaaaatacaaaattaactgggtgaagtggcgcatgcctgtaatcccagctactcaggaggctgaagcaggagaatcatttgaacccaggatgtggaggttgcagtgagctgagattgcaccattgcactccagcctgggcaacaagagccaagctctgtctcggggtggtgcggtgggggagaagtaatacagagacatctcttacacattttcccatttcctttacattttgcaaaactatagtataatatcataaccagggtaataacattgatacaatccacgaactttattcagatttttccagtgttatttgtatggtagtccctcagtatccatggaggatatgtttcaagacctcccagtgaatgcccgaaaccatggatagtactgaatgctacatacactgtgttttttcctatacctatataaccatgataaagtttaatttagaaattaggcacagtaagagattaacaataactaacaataaaatagaacaatcgtaatatactctaagaaaggttatgagaatgtggtcgctccttctctctcaaaatatcttcttgtactgtgctcacccttctggtgatgatgtgagatgatacagggcctacgtaaggagatgaagtcaggtgcatgacgtaggcctgtgacatagcgttaggctactgttcaccttgaacccaggcactgccacaccatgacagtcgatctgataaccgagctggctactgagtgactaagtgactgcagaatggatcagctggacaaagggatgatttatgtcccaggcgggacagagcatgacaacttgagattttatcacattactcagaatagtggcaatttagaacttaggtattgcttacttctgggtttttccatttaatatttttggactatggtcgactgcaggtaactgaaacagcagaaagtgaaactgaggataaatgaggactactgtacccatgtggtgtgagtgtgtgagtgtgtgtgtgtgtgtgtgtgtgtgtgagagtattgagttacacacagttttatcacctgtgtaggtttgtgtattcattatcacattcaagatactgtacagatccaacaccacaaggatcccttatgctgcacacccatgtgtcttttagtacaaaaggagtagtccagtaatttatgtcacctattcccaaaaaagtcaattaaaaagtataacgtcaagaattaaggaaattctacccccaataattttgcactctacacaaaggatttcttgcaatttggggcaggtcagtctacattagtaaaattgaaccatgaagggttttctccatggatgcacttttattactgtcaggtatggtaacctgaactacgtgctggataaaggccatgcatggcttgttaacaatttctttgataatgattttttttctgtcatttgcacaatatttctgaatgaatgctccatgaaaatagcttatttgagtagtttgttcattcaagcagcttagccatggcccttgcaatattactttcaccattatctgtttcctagagtatcagagatggagaaactcttggggaccattgaatcttaacatcctgttttacttttgaggaaactaatgtcaaaggaaattggaattggggctggaacccaggctttctgattctttgcttagtaaattctttaaaaaatgccagaaagttaaggttataaaaatatttaatgcaaattaactcttggtaaaattttttcaaattctgaaattcttctgaaatgctggaatctttctgggaattttttggcatttagtgtagttagtacatgggaaaaattaggaattttcagggtgagccacttcttgtgacaaaaaagagatttgtttaatcagaaacactggctgttggaatgctcctaggttgctttagaagagagtttgcattgttggttcaccaccttctacctgggttgtaacctcatataaccattaggatgattgaccgttttgaaaatgagtggccattaattcattttgttaggggtctttgagcttacgagttttcaacttttttcatccttcttgttggaattctgggttgtgatttgaagatacttccaaagaaataaaatattcctaggaccttaagaacccaggctttgtaaacgtgatatgaaggacctcttgaatggcattccacagtttggttgtttgaaatcacaggtgtttgttgggccatgtgcaggaagaaagtcattgtacctactttaagtaaatctgggcatgagaacaggtcaattccggtattttccaagcattgtggaatatttcttcccttacatatgttaaattgatatcatactacatataatgttttagatcctgcttttaaaataaaaaacccctaaacttgacagggtgcagaacaatatatcaccccaaaaacccccctcaagctacccctttatattcatacccttcttccatctctgaaccctgatgtgttttctgttactatagttttgtctttttgagaacgtcatagatggagttctatagtttataatcttttgaaacaggcttttttcactcagtacaatgcttctcagcttcatctaagttgttttgcacatcagtagttcattcctttttatggctgagtagtattccactatacagatgtacaatagtttgtctgtccatttaatgttgaagaacatttgagttgtttttagttttgttaatttatgaacagagttgctaaaaacactcagatccagggtttgtaattcctttttcttgacttattacagtggctaagacttttagtacaatattgagtttgaatggacatccttgtcttgtgtccctgatattagggggaaaacgtttagtccttccctgttaagtatgctatttgctgtaggtttttcatagattgcctttatcaaattgagtaatttcctttttcgccttagttttctgagagtttttatcaagggtggatattggtttatcagatgtttttcatgtatcaattgatatgctgaggtggttttaattctttagacagttaatatggtggattgcatggattgattttcaaatacggaatcagccttgcataccctgtataagacccacttgatcatggtgtgtttttcattttgtatttcctggatttgattgatcatattcggttgagggcttttgtgtctaggatcacacaagatacggacctgtaattttcttcatttggtactatcactgtctggttttgctaccagggtaatactggcaccataaaatgatttaggagatgcttcctcacagtttctggaagaaactatgtacaattggtgggtcatgctttttaacttatcatgggcatccctccatggaattaatcttaaaaactagttttaatgtctgcttaatagtaataataatcacagtatttttcttcatgttacagcatgtaatgtttattgggcatttagtgtggccgaggactgttctaagtgctttacttgtactgactcctttaatctccacaataactctatagagtagataccattattatctccaatttacatgcgaagaaaaataagacaaacagtttaaataacttgctcaaggtcacaaagtttctatgtggtcaagtagaatttgaatccaggcagtctgattccacatcctgtggtcttaactattacatcgtatcctttgattatgtcataacttatttattcagggttccatttgagatccatattttgagattttccatgccttcactttgatgactgttcttgtcagaagtctttgacaatctctgccggtttctttaggttggatttctaaaggtggtatttcagcatcaaaaggcatgcccatcgtaaaggctcacacgtactatcatgtaactttccaggaattggaacaaatttgaaatcccaacagcagtgtttgagagagctcaattcgatgttctgttgcctgaattatttttatatatttttaattcaatttgattgtagaaagatggtgtcccgttggtttagtttgccttccttctttaccgagcaggttcaacgttttacacgtttgttgaacttttatatttattttcttgtgagaagggtttgctcatatccagtcttcattttcttctaatgagttaatagtgttttttcttaatgttttgtaagagcttttatatattttgttttactttgccgtatttcaaaagtcttgttcattcttttttttttttggcatagaggattctcatgacatctggcccacgccgtatctctttccctttattttttcatccgcctattcttagattcaggctcttagtcaacgtatttattcaccatttgtatggtttactttttaaaaaatttaactctttacttcatttggaatttattttagcataagattaaaatttaatttaaacagattaacatatttaatagttaattccagaattgtttattgactactgtttcctctacctccacatttgtggtatcacctttattccatgcctattctcttatgtaccagaggcaaatattttatgatatttattttgttatatttactcattaattaattgtaacttattagcatgttaattatctggtaggtcaagacacctttcctgttttttgaaaaaactatttatttattgttatcactcatttatctttccagatgaatttataatcctttacattttctccaaatccttctaggttttgataaatctataaataatttatggaaaaatggcattttataatgttgattctttttgttcatagtgtgtttcttcatttgataaaggcttttaaaaaatttgtcaagattcatgattatttctctatttcttccttacatttactggtgaaggttactctggtatttattatttgttgttgctcttgtttcatcccttaatagtcttttaaaatattgcttctttatattttattcttaaaaatgtgaaattatacaatactgaaaataaacttattctatgaatcaatatctttaggttcattctgtagctgaggagtttttttactgttggaagactatgtgctgtccattggggtatggatccccttggctattagtgacactggttacttttcattatgctgtggaagtttcctttcatttgtggttttctatattagaaaaaaatcagggccgggcgcggtggctcacgcctgtaatcccagcactttcggaggctgaggtgggcggatcacgaggtcaggagatcaagaccatcctggctaacactgtgaaaccttgtctctactaaaaatacaaaaaattagccgggcgtgggcgtggtggtgggcgcctgtagtctcagctactcgggagactgaggcaggaaaatggcgtgaacccaggaggcggagcttgcagtgagctgagatcacgccactgcactccagcctgggtgacagagctagactccgtctcaaaaaaaaaaaaattagccatggatgttgaatgtgatcaaatgccttattaacacttattaaagtgtttaatataacaatatatatagaaaaaaatatccttactaaagcacttctgaaagtgaatcttacaaaggcatgacatatatttttaatatgatgctggattttatttatttgcattttctatgaaatttttgcctatatatttatgaaagaaatagacatatagctcctttgccaggttttggtgtcaggatcacactaactttacaaatgaattgataatttctatgttcctctatgttctggaatattttatgaagcatggaaattatttgtatattgaaaatttgacaaaagcacttatagtgctgcctgccttacagtcttctatgaagataattttgaacaaactttaatttctttcattgatacttttctgtgtgggtaatttatgttttcctagagaagtgttaatttcattaatattttagaaatgaacaaaattatgaagtactttttttgttttaatttgttctgtaattgagatcatataaacttttctcagtactaacgtatatgtttatttttttcattgataaaatctgactgtatttggtgtattttatcaatttgtgaaaatttgtatcttgtatttcttcattaatttttctcttttcccttttccctgagtcagtaaagctttaatatttattcaaaatctcctcttaattcctgtgtttattttcaaatatcttgaatgaaatgctttatttcctttttattatttcttgctttataatgcatttgatgtttagtgtagctttagactcaaactataagttttgaaatgtcatgcagtcattattggtacttttcaaatagtcttgtaattatagtttttattttttctgcaattaattatttgagagactgaattttaacttctaagttgttggagtgtgtgtgtgtatatatatatatgtatatataccaagttctaattttatttcgttttgcctggagaatatgacctttaattgtggcttcttgttggttttggttgtttcccttggaacatgaactgtttgtaatttggatagttatttggctgtgtcttcatctttttgtcttttcctcttcattctgtaagagcctatgtttttttccccttggtaatttgattttcagcactattgggtctgctgtctgctgcctcttattcccatttatgttttgtgtttgcatttctggttttttaaccattttatgtcttgtcatctccatcttagctgactccccttgtaatcttagccttttccatttagtgatttttctttcatatatcctatgtttatttgatattgagattaaaaaaaatggattccaaaatttacatcttcttcccataatagattttttttttttttagaagaatagtgttttacttcagatgttgcagagaattttcaaaattgtcttgagttatcaaccttgaaagagaaggtccaggccgggggtgtgcctgtgaacagaccctcctgtcccttcagcgccctcaccactctcacctggtcacaattgtcaggttactgtgagcatcgcttatgctgaaggggtggttgttgtgcatggtccctggccaaccttccagtgttgatgttgacttttctagggtgactcagcttgcctgagaggggatctcctgctccttctaccttgtagttagaatactgaggtggaaccttattcattataattttgatcagtgatagttcttcctagttcttatatctagagacagtgtgtgaaaatctgccaccctggtttgatccctcctgtggctctttccatcgcacctcttttctattaatctccagaaggctccataccaccctccttttgcttctttgcctagttgagttgcatttccgggaactggggtctctgaatggatgggtatagaaagacatattgatgggggggaatggatgggtatagaaagacatattgatggggggggtgccctttacaacagttcctttcagcaacaaatgcctcatgtttctgagatgggattcacacctggggacccatgtgcccttccacagtccgcatgtcacaatcccttcttgtgtgttaggcattcatccacactcagcttcttttatgcatctctgtatttccttcagtgggaatgacccattgaagggtcattgggtcctaatgctaggctaatgaccatgcatcccagaatgcctgttcagattttagcttgaaatttttagtttgttacaaagaaaaagaaattgggatttgggaacaactaaagctatccgatattaactactctgtcttagtattttttaggcttacacctgtttctatggtttaccccacgtaattatctctgcagaaccatggattaggtattattatcctcatttaaattaaagtaactttcccaaggtaaaaaacaggtagacagggcagttttgaacttatactttctgtgaaaacactcttacactattttccccatgccaaacatctctgaagaaagacatttctggatatttctgccaggaagttagacaaggagctaccccagtgtggtttgcagaatagtgctcccgaagatgtttacgtccgaatccttgaaatctgtgggtttgttatgttacgtggcaaggaggagttcaagttgctgatggaattcaggttgcaagttagctgaccttggaatagtgagatgatcctggattatcagggtgggctccgtgcaatcacatggttcttgtaaaacagggaggcaggagagtcagccagagaaggtgatgtgccaacagaagccgaggtcagaatgatgtcattactggcttgaagatggaagaggccgtgagccaaggaatggggggtgcctccaggagctggacaaggcaaggctgcagattcttcccaagagcttccagtaggaatgcagtcctgctgacacattaaatttagcccagcaagacttctgtaggattctgacttccagaactgtatggggctgttgaaagccagtaagtttgtggtaatttattacagcagcaataggaaacgcacgcacccagtgtatcgaatattggccatggtctaactctctgcagagcaggaacaggaagtcctggagtgattggctgtgtgtgcacacccaccacatggaaatttacattaacatgtaacatgttatcacttgattatatatttattagctcattttattgttgtcaccctcccctagctagaatgtcagctccctaagagcagaaacttggtttggtgcattcatggctgtatgcccagtgcctcatgtggaggagaggctaaagtatttattggatgattaatttttttcccaggtgacattgtaccaactaaatggaagctaacttttatcttgtggtggaatactgtagattatataagtaataatagaaatagaagaaattgagttaaaattatctacccttgacaatcaaaatatttattttcagtgttcagtgtttggtcatatgtgtaaatattattcatgtaggtagtaaatatttccatttaaggatcaaacatgcaacatgtgacattctatttattttgtgatgatcagctctctttattttatgaatatttttatgaataaaataagagagatggttatcacaaaataaatgcaatgttgtatgttgtatttttgacttttaaatagaatgtttcatgttgcacttttgtgacaacatatttgaaataaaggtcactgaattttttaataattatctcagtctggttggcattctgttgactgtataggtcatacttatttattgttggttatttaaaatattatagtttatttgagatatttgaatactgttaactgaacacctttgtgcatgagtctgctgtcaatcatgttagctctccaggcatcaccgtagtagtccagtagcctgcactagctgggaaagccactgacgaggactctggagttagagagcttttgcatattgatagagaactctgttggctaagctatctgcctttaggcttgttgcatgcttttataatttttgtctaaatctatttagagggaattctcacctggcatcaggtgtcctcaccttgcctcttcaacgtcagcttgtgcttcttctatggaaactcattcctcatcagaaatgcccagaacctctatgacaagtgtaggcaaaagcgtagtatgaacgggacaatgatggcaaaggaggagctaccaatttggaaaatgaatcgacttggaaactgaatcaacccccaagagcgttattagtatcagactaaattatctcctttaactgcgtcacatcatgacctttactttttaaacagatatcttgtttttcttatcttctcttcttgacagttgcttcggtttttctacatactgactgttcctctgataacaaagcaagaaggaaaaacaaaattttaactgtcaactgagtttcgcaagagcgatgagcagtccggggtggggagggtctctccccaggctccccgtggttgtacaagccagcagcgttaacggaagtgcacacagcagttccaagcctgggaggagaaggatgtccgctccaggcagtttaggatagttgttttgcctaagatggcaagaacatcacccttgcatcttgagccaaggaaaccatacatggacgcatcttgtcctacatgggaagggatacccctgcaggcttctggggtaccataagtgtcccgtgatggctctttcaccttggggtttgttttccaaacttttctaagtcattggaaagtagagtaggaaggaggggaggaggaaggggagacaagaaatatacttgcctgtgcatgcacttttctgattaatgttctgagtgtcagcacacagtgaaggtttattttagaagacaccaggaatgaaatattttatgttgatattgtgcaggactgatctttattttctgctatgaaggacggtataacttcatgatgctcctgcatctttgtagttcctgtcatgaaatcattcaggggtaggagacatggctcacaagagtgaagggcattgcctagaacaggagtgctggacagtgactctagagacaggagttctaatctcacttcagctattaactttctgcatgttctcttctgttctcagtttctttatctatagaatgggagcatttatgctaaattgtctttatattggtaacactaatttctctctaatttgattattgcttttaagtctctagcctcctgaaagatgctaccttctaaggctaatttatagccagagtaatatggttttgctctgagcatgccctgaatcattattcgttcttatttcatgagaattacttttgtaaatgttattttcttttggtttcacagagccattgagattgcacagctcggatttcttctgcatgtcataaattttgctaatagtataaacccgtgtttttcaaagtgagagccttggaacagcagcatcagcatcgcccaggtcccctgtgagcttgttagaaatgcagagtcatgggcccctccccaacctgctgaatgggagcctctgaggatgagacccaggaaagtttgcttaacgaagttggcatgtattgcctgtgaaagagaagtttgagaagcactgctgtgaaacagggcagccaggaggtgctgtgattttgccctctgcacgtggtcacacactcaagcatatggtttgctccttgcatgactgcacttcagatgaaatgccaagattgagacccttctatgctagtgaagcacaggctactttattgagagcctagcaatattgagagagaaaaatgcagaccttcttggggtagaaaggaggatgggtttcctttccttatgagatgggatccagcttccttactactatagagtctcccatggatggtggctttgctgacttcagagagagctgcaggtgcacaggagcaccgtgatgtcattggtgtgctctgaagaaatgaggccatgagaagaaggtgaacagaaggtatttctaaagggtctgggaagaggaacagcacctatgataatggctatcatttctgttgcacagtactgattattttgatggttggccctgggctttgatttccagccctgtggtcacacacactccttataatcatctgctcccaggagaaggtgtcatgaattctctcttttcctccagccttagctgtcactggcctggaatacggtgtgactgtgtagaagctgttggcattgtttctgcattgtaaactcacacacactgagttaaatgctgctgagcagttaatgtgcccactccggctattttctacccaaggatacttgactcatttcttatatcctctactgtcctttaaagctcaatagtgctctatcggggccatttaatttggtggcacaaggcatgccctgcatgggatgtctgcttttgtttgagtgggactgagaccctggcctggagctgtagctgcttggagcaagaactgcctttttcaaatgtgcatgaaggtgctacccactcatcttccctgcctatgcccctacctagtgcagaagtaaggtgaggtagggtggtgctgtcgccagtttgtacaaaggaccagctgcggctctgggtccctgtatggtgcaaggagaaacatttattttcactcaggtgctctgccttaatctaaagcaaaactcatggacttacctcctacactagggtcccttcctatttacacacctaggttgagtacctgagtctcctgaattcctgtgtcttcatcagagcagcgtctgggaagctgggtctctgtactagctccttcacagcgtctctcccatggctcctcatctggactgtcacctcatctcccctcaagtccagatcttgacaccttgtacttgcaccttctggcttcttacctgtctggccctctagaccccaaccccttcctcctgactgttccagcgcatcacatggactgagcttcctgcagtagctttgagatgctggcaggtgcatcccctgcagaacatccattcatatgtcccagtttctccattacctacaaggtgcaactgagccctgcagcctgcacctggagcctccagatttctgctccagcctaccttgaagatgaagagccagtctgtagtcttcaaggtcaaggtgtctatgggtcataaatgcatttaacagcatgaacgctgggtgacaaacccaataaagaaatagtttcactctttgaacacttgtgaagtgctcatgtatgagacaaatttcaaggcctaatttgactccaacgtcctgaccacttcttctatctcatggcgaacttttctgtttttgaatttattcataatttaatttgatataattcaaccaacttttattggggagccatgctctgttggtaacatatgggtctaaatagcatatgggacacagtcgttgctttgaaggcacctagagtcaagtagggagaatgggcatgtacagtcaaaagactctcatgccacctgtgaggtgcccctaaagagcagtgtgggagtgtgcaaggggtgttgatagtgagtgatatgggttaattccacaagacagctcagggggaagccagcagtgccttcctagagaagcttggagtttctgtccctcccagggggttgatagaccggcccatatatcatagtatgcttctatcctccactctacactagttttagagaaaaaataagcaggcttgtcatggtggctcatgcctataatcctagtacttcggaaggctggggtgggaggattgcttgaggccaagagcttgagaccagccttggcaacatagcaagaccgcaactctgcaaaaaaaatatgcaaaaattggccaggcatggtggtgcatgcctgtattcccagccactggggaggctgaggaggcagcatcatttgagcccaggcgtttgaggctgcagtaaactatgattgcgccacttcactccagcctgggtgacaaagtgagaccctgtctcaaaaacaaaacaaaacaaacaaaaaacaaacaaacttaacatgagcaccaagggcatattgaaaggtcaacagctgtggcagaaacccacagagagagagggatgcaagtgtggagatggagtgagggagtgtcccttggggatggtggctcatgtttataaacctcactctatttttcggtagagtttccctcttcttttctgggctgttattctccaaggaactacctaagctctggacacttccaagccttgcaacgaactttaaaatgtgatattcattacattatttagcacttggcctgaaatgatgacaatgagaaattatggcaacacaacaaacatttgattagctctgtttcattaggattcttcacattttgagtttagagaccctctaggtttcgggagctgcagatgttcatccattttcctttccttctgaagttccttctgccatggaaagagaagttgggaggaatttcagcacctggtgctcctgggcctgcaggcgggggtcagtgtctggtgtggatggcggggtcgtgcatctggatttggttagctggctggccatctgctgttcccctgcctcagctgcccatcttcacctgctttgccatctgtaagtcatcctgagaagggatttcatgagaattaccttctgagaaggcctggtgtgccgtccctttcaagtcatgggaatctgtgctttgtgggttcggcacctgttcccgtcatgtgctagctcagcttgcagaacatccacccagcttgcagaacagcttgggtccagtctctctgagacaaccaaacaccagcagggccaggctggaatctgggctctgagctgatccttcccctgctctccatgcataggacctgtctcttctcctgcgtcgtcattgaatggacaacagcatgagcattgacctgtggctgaattcagctggattgagattcactcttggtgagagggagattgagcaggagagatatgcagctctcatgaggggctcttggtttggcctccttctcatcaaatcccagcctgctccccctttttcctcgcagcctccacctcgccttctgatttaagcctgggcctgagtttcacgtctgtcggttttactttcagtcgattttacgggtgcctgagcggctgtaacattttcctgctgccttttctattttcaacccaaataggaagtgacaaagatggttttggtgcagagagaatgtgattcattttgttacttttttaaaactttttttaaagttcaatatatgtacagaaaagggtatctatcataagtgtatatagcttgatgaattttcactaactagacagcagccgccaaattaagaaacagagcaggatctgcacccttgaaacctgcacatggtccttccgagtcaccccccacaagagtgaccactgtcccagcttctaacagcagagagcagctctgcctgttcttgtgccgtttgtcatctgtgtgtctgttttcttgctgaatgttatgcttgtgagattcatccgtgtcgtcatgtctagttgtaggttattcattattgttgccgttcacagttttattgtgagaactgatggacatttgtgtgatttccactgttcatctataatgagctgtgcagctcagaacattcttgttcatgcctttccgccatcacttgcatgtattttgatctggtgtatactccagagtggaatggcagggtctgaggggatgctatgttcggctgcagtagatcctaataaacagttttccaacatggaggtacctatttaaagtgtaacttcgattttaaagcaaagtggatgcttgggtttgaacttcacagtcacatttattggattgaaagggctcattggcaacccacagccaagagaccaagagagagtcctaaccatggggagggagcagttgccagtgccctggcatcctggtccccgccctggtctggtgttgggtctctgcagcatgcaaaggggatggccagacaagacacaccgaagacacacctcctgccctctggaggctgattgtttccacaatgacgacaatgatcatcagtattactattgatctttctcctcctcctgtccttctctttcacttctcccctccacttcacccaaaaaaaggagttttattcccatccctcacccagcacacacatgggcgcatgcacacacacacacacacacacacctgccaaattcgtgggaggacccactcctaaggttgggatgcagttgggaatcacagtgtggggaaaagtgttagttacactggaggaagtgtgatgcaatcactggagctctttgagaaaagcttattttaaaaaaaaaaaaaaaaaacaacacagagtaagaatgagtctttccaaaattactgtgtcttgggccaggcctggagacagccctatccctctcttatgctccttgtgcagtgtttgagatgcctaagcccgtatgaagcacaacaggagaagcagccccagtaccctcagataaaagcaacaggtgatgcgttttctaaatagtgcattgcctttctagtgccacctcctgcaactggggatcccactgccagcagcctctccaggcacccccaaggctgtctcccacaggtgggctaggagatggggaacagggctcgctgctcacctgaggacctgcacgggcaactggaaggggccagctgaacacaagaggcactgggtgctgttggagaagagggtgcttcttcgggacatttgttagcccatcagaggatggtgaccccagggtggctgaccctttcttcctccattcacttcagctgggtgtggcagaggagcttggacacgcatcaattgcatgtctgcagggccagagaggtgtgtcatattagcaggtaaccaatttgatccacaccaccctgtcacattgttttcaccccaagggtcctggctcccagcctgagggatctcaaaggtccccctcgatggctttgcctttgagaagtagggggagtggaggcatgggtgaggaaactgcctggacacaacccaggggccctgtgggcagccttggcactagtccagggctgggaagctgccccctcagttctatggccctcgttggactgtatgggaccccatggtctgtggagtgggagaagcacaatctgcggttgtcctgagtcttttctgtcttcctgcaggctgcccaaccccaagggcctaacagagatgatcagtttaaccaggtagaacatggtggttttgatacctccttctgttagtttcttccaaatggccaatgtcttggaaaattctgttgaccagtaaagctttattaataaagcattcattttttcgttttcccactgaaaatcatcatagacccacatgactgccagtggggcttcaggtcacactgcaacaactgctgtgactactagagtttatctaactgtgtctgaaactagaggctcgtgatgttcttgtgagccattgcagcctcaatggtgtacatctgaggttcctgttgctttgaaataacatgcagaccctcaataccacactgtcctacttctagaaggagaagtagctctgaattgtgagtttgcattgtaaaagcagttttctccttccaggagtttccaaattctaagtgacagggaactccagggatagtaaaactctcttcagagtggacaaaactctgtatgtgcagacaggctcaggaagccagggaagccagaggaggtgctgctgcagtaactcatctctcttgtgaaggtggaaatgaaaaaggaatctcagacctccttctgtgggtcacccactgtctctggttagtgagcctgatttgtgggcaggtgagtaattgagggagggaaggaggataggctggggatgaaggttgggttgggatgttgtctctgcttgggtttggctgatcccacagggtgctctggagcacaacaacatcacacagttgatcttatcttgggtcaatgggaccactttttgtagacccagtcagccactcactagcccctggctgcccctcgcatggggcaggggaaatgtgtgactcctaagcaaggcagcttctctggacatgggggaagctgagagccaggagcagccagagctcacagcagcagggtgcatggccggcaagggtatctgcaggcattggcagcaagtgccacgcctcccacttgtgaacctggctggccacgggctaccacctctctcagcctgtcccggtgaagagggttggtctagatttagatcctactgtttgaataagtctctgcagccctgcagggatcttgcagtagattgagggaaagcaaaccaaccatgtccaaaaagaccatgccagtgggcaaagtggagcagcggagatgtggctgttagggtaggacacggacggggttatccagaggtgtggggaggtgtgcctgtctcagacctgtccaagattctttctggatggcatttctgctcagccatgtgttcctgcttcgtccatgtgctttgaggccccagggtttgtgcacacaatactcggggcttgggagtgccccatgtagctcagagctgtccacccctcactccccaggcatctcctctcaggccggggatgcttttctcaggatggcctggccgttttcaggccactcggtttctccatttctccattcttgcggtgggcctattgattaggagaatctcacccagtctcgctttggccggggtagctctgccaggtctgaattcttttcaaaaattgaaaagtacttgtaagtagattaaccgtgcatgcccggggcgtttcccaaagccagcattgacaagtagataagaatgatttataactagcacttcagtctgcgtcagtggtgcttgtggacagataacggtgtcttcggctcgatttcttcttggctgagttggagatgctccttccaggctggtggctctgaattcaagaactctggcacactcagctctcattgagggcaatcgtgatgaatagtgaatcagcttcccctgacaatgggggtcattttactgcaaaatggctgccctttgtgtctctgggaaaagggtgctgagaaatgaatgtcgagggctgtagaaatgctgaataataagtgaacttgatcacatcgggcagcgagtctgaatgcctccctttgatttgacccagttataccttcaaggtcccaggactggtgctttggaaaaagtgactggctccagcacatctctgtgtacctcaatgctatcagatctccatcatggactctcatctcaatagaatgttaagttttgagaataataactcaaagaatttcctggaaaaggcagaggaggtgaggggtgggattgtgaatgggcatactggagacccagctccaagaggaagattaatttagaactcagagggaggggccttggcttaagctggagccaggctgcatgggccctgatgggaataaatagaagccccaggttttgtaggtgtttcacctcattcctttattcattaagtcaatgggcaggtgtgggattaggtcagttttgctcgtattgcatttgagatgtcccatatagattgaggtttgggcgatagaggtttgggttgtgggaggaagcaattctttactcttttcccaagactgtactgaaagcagctgggattgcatctgatgttttccacacgtggctgtaatctgaaagtacagggcagttgtcggtcgtctctaaattcacggggcaagtttgcatccctagttaagtaataatttaaagaaatggttaatcatgaccttcctacagatataaaataaacatgtgttgaagattttctttaactcattatgaatgaggaaactggtaagatgttatagacatttcaaaggagaatccaaagaacggacacaaatatagatcaggagtattgaaatgaatgtgcaaatggaggcaaaattggtttctttcatagtaggggagagaagtcgattgaacctactagacaaaatttgcatgtatagataattattttgcatcactgtcaatttacagagttgtaaaagagctcaaatgcaatgaaaagtaagaataatctggaaaggtgtgctgtaaacaatgcataatttcctgttgaaccacattttttttccttttctcttcttagtaaagttcaatatttttatcattaaacttgttcagaaagtgtctgtctctttaaaatatgtaagcaataataaaagtttcttttttatttgagatgttttatgtctgtttttatgatattaaattttagatagggcttttactctccaaataactctaagagttaatgaaattatcccaggtgatttcctgagacatatgttaatgagtagaaagtatgatttataagattgatgtatattatttgtaagatactggggatatgaataacattggaataatgagtctgtgaccagaataaaatagctcaaacaacacagaagtttccaaagcacaactgttacggggtgggctacaggaggtgagggaataagacacattcagaaacatctagataattccagaacataacttccccaaaataactgcgaatttcttcatgcgttatttttgaatctctgagaacttctagagtgatttaatggaagttaacatttttcctagttcagaaggaccccacagggtagatgcctctatcttgtctgtctttctaaagtttatcctgagaagatgtacaggagaacatgggtaggtaattcatggcagaattgaacttgcaaagcttcttctggtgtaatgtggaaatagttcttcttgacctttctgcagtctttgacattgtggactcagctctcctgttggaaacctatccctcatttccttaaccctcttacagtccctgtttctcatctgctagggctgcttcctgtgtctttctctggccccttcttctttcctccccttggttctgaggacgcagccccaggcaccacgctcctctctccccagagccttccccaagaactgaatccccatgtggaaaatcagccacccaccttgattcagatgactatgatcttcattcatctcctgagcatgattccagtattccccacgaccactggaggtttccacctgaatgttcttacactcgttactcagagtggctgaaatgtagataatcaaatatcttccagtgaaatatagctcccttttaaacgtattctgtcatccaattgtttgacaattaccaagcattgtcaattcttttttctcaatctctctcctatctgacctttcctctcattccattgtcaagccataatccaggcctttatcccttcatcaaggggtcatcctaatagcttctgcattcatcttaattcaatgagcattcctttagtgccttatgagtagataccgtgaaccaggtgctgacgtgcctggtagggctacaatgccgagaggctgctgggaagacagacatccgttagatactcacactgttaagcaactaatcataaactgcagtaagtactagaaagaaggtgtggtgagaacatgcagtggggagctggacattagcctctagggccagacacggcatctgaggaatgaagagacatgacatacatcaaggcgaggtggaggggagaatttaccaggcaaagtcccagcgctgggcaagtctatggggtggttggaggcatggcatgtcagagagactgagcatgaaaggcctgttgctagagcgaggtgaggtgggagaaggcagcggcaggccggcaatgtgaagttgaaataggaattcaggtgtctatcctcagggcagaggcgagtctttgaagggcttaagcaggaagggaatgacaggatcaggtaagccttttctaaaggtcattgtgactgctttgtgatgtccaatagacaagataacctgaaaatcctcctgatccaaaacaacaggaaatgctggataatatcacagcagagctgaacttagaagcaggtgagagatatccttggagctgtaaataaagaggaagctgaatacccaaggagcatgttgtcactcactactgcatctctcctggtggcatttgcccatctcagtaaacaagaaatgtccgttttaatgactgcacaaggacagaagacaaggctgggggtgaaagtgggttggggaattggatctgtgaccctgccatgaaagaggagccttttgattaataaacaggggactgtatggtaaatccgcttctcacaaaataaaatgctagaaagtttgtctcttttgatctgggctctaggtggggctgggggagtcttcttaaaaaatatcttatcgtggacctgccccaagtgggtttggagttctttacactactttcatggtcctggaaacctcatgccaagaaattaacatattatagtaatggagttcacactggtcatcagtgcaggattcctagaagaagaatggaaattttctctgaaattctcagtagaaatgaactctaaataacttcaaataataatattcatgaatatttatataaaaagatattttaaatatttcagactgtataaatcaatgactacataagtgtgatcaatttgagttggcggtcagaattatgacattttaagtccctgtatttttgaagaagacagtcaatatagagtgaaatttaattttattaaatgaaacgtttgtgttaaaatttatggagaattactaagataatacattcacaacacaaaggcacaaatggttgaaaataaaagaatggaaaaatatgtagtaggcaaacactaaccaaaagacaccattggattaggttggatattactatccaataaagttgatttaagagcaaaacattattatttgagacgattttaatgctaatggtaattttaatggtaaatggtacagtttactgggaagataaaacaatttaaaacttctaaacatttaataacatagtctcaacatgtcaaaaaaaaacttcaccagaaactgaagatataagaagaaacaacaaattttttaaaatgacaaatttataatcagattgagagattttaatacaattttttggtaactgaaagatcaaataataaagtctttaaggtatagaagatttgaacaatggtttgatttgatggacatatatagaactttactctcaacaatatagcataatattttccaaaatatctaagaataaaacatgtgtaagaattcactttgtacgtggccataacacaagtctcaaaaaatgtcattgaatcaacatcacaccagttaaattatttgactacagagagacatatatagccttatgttgaatattgtatatattatcttatgctttattatatcacagtaaaggaagactaaaattaaatatgctaattgttcagtgtgataagttagaagaaagaataataaacctaaacaaattagaaggaaggaaataatatatatgagtagaatcaatgaaatagaaaacagctattatcagtggaatggtcaaaactcaagttttgttcattatgaagaacagtaaaatacacagattctttgacaagcttgatccgcaaaaatgaataatgttagacaagaaaaggaggatataggtacagctatagcagagattattaaaaagataaagtgactcttaccgacatattaggcaactcagatgagattgacattttttctagaaaagtataacaacattgactgaacaagaaatcgaaaatgtgaagagatgtataacactaaaaattttgatcagtagttcaaaatatgtttatttaaatctatgatgtaatttatctcatgaacagataaaaaagaacaggattatttcaataggtgcagaaaaacatttttaaaatttgagcctattctttgtctctctctccctctatctctgtcttctatctctatccctttctctatctctatctctatctccatctctgtctgtctctatctctatctgtctctatcttgttgtctgcaaagcagggctagtagggagtaaagagtatttatcaaaacctgaaagtaaatataattatcaattaagaaataataaaagcatttcctttaaaatcaggaacaggcaagagtgatcattgtcatcccttttaatcaatattttatttgtggttataatcagcgtaataagtcataaaaggaaagtaaaagcatttcaacataagaagtacatttgtttataaatacgttttttaaataaaaaagaatataaattcgatgattagagttagaaacaaaatcagttccatatgtacacgtcagtcatgaatagaaaagtacatagcgtttagaaagcagggccaatgactccagtaggctctctgatggctcagtgaggcattgcctggtgagtgagccttccattttaggtacagaaagaattctgtgtgcaaattatgcccactctcctacctaccctcgcgaaagttacttgtaaccccagttactttgcataatatttttttgactaaaagaaaattatgaagaaaaaaattttaaatcctatttctgaaatgtcttccactctttttagtgatctatgactttctcagaaaactcttttggaggaaagggtgtaatcctgaggtagtaatgttgtggataaaaatatgaggctcatagccactgaaatgctcatttctagaggcagcagacagttcccaattctctctggtttggtagccaacaatcccgcgtagatgatggagcaacttgaaatgtggaattgacatgtgccttaggtataaatgctcatcagattttgaagacttcgtacaaaagaatgtgactatttccttattaattgtatattgagaacatgctgcattgataatatttttgatatattgggttaattaaaagttactacacttaatttcttttagaaaacttctaaaatgtgaacactagaaaatttaaagttacatatgtgatttgctttttagatgttttatatctacttgatgacactgttgtaggtcctccaattcctaattgtgtggtttggggttagtgcttaattttctctcagcctcagtttcctcctttgtaaataagtgagataagtgtgtcctctaccttagatgattgagagtattccatggagaaacccatcctttaaaagacaacttgctaaatggtaaagctttataaaacctacataggtttgttgtttcttatttttcagtccatttttgttccagagcatgacatagtcccaaaaatagaaaaaaacaaaacaaaacaaaacaaggtggagggcttggagaaaatctaccatgtttctgccacgttgcctccttgtgggagccagatgtcagaaccaacctctaggcaaggttttgccatttctcttctactttcaaagagaattctgtgtgccccgcatcccgttcatcatgctgcagtagtacagaattgtaaacattaccatgtaagctgaaaatgtgcaatatcatctaaataattaataaaaaaatgacgatggttttgtaaactttaacattttttctcaaatctttaaaaactctcttagtattggttataaagcatagtaaagtggaaaatagtgaaactaatattcagtcagtacatttaacagaacatttgaaatattgacgtggagaaaagggaaccctagtacccttttggcggaaatgtaaatgaatacagccattatggaaaacagtatgaaggttcctcaaaaaactaaaattagagttactatatgatccagcagctccacttctgggtatacatccaaagactttgaaattggtatgttgaagggatatgcacattcccatgcctgttgcagcactattcatgatagccaagatacggcagcaaccaaagcgtccatcgacagatgaatggctaaagagaaggtggtgtatatatacaatggagtactgttcagacttgaaagatgatgtcagttgtgacaacatggatgaacctagaggatattgtgctaagtgaaattagccaggcacagaaagacaaataccgcatgatctcgtatgtggaatctaaaataaccagacacatagaagcagggaacagaataatggtttccagaggctggggagtggaaggaatgggcagatgttggtccaaggatatgaagcttcagttggacaggaggataaatgataagtatttgagataacgaatatgtgaattagcttgatccagtcattccacattgtatatgtagatcaagcatcactttgtatctcacaaatagatccaatttcaatttgtcaatgtgcagttgaaaagccattataattttgagaaccaaagtgttttatttctttgtaaaacaaacttaccaagagtagtttgaacagtgcttatgatgtggagtgagtatctttcctaagccctggcaagcttccgtactcctaagtttggctcagcttccaacatcttatcttttgtgctctcagtgtcatgaaatatcttcaagcatttctttaagacatcatccttttcctcaagaccactttcttcatttgtgttgtttgtcttcactaattcctgtgtctccaaatctagagtgtctgtacctcaggagtgtcaacatccccacggtcagctgcttcttctctagctccatttatattccattcacatttcatttccagtgtgaacatatttcatttctttgcttcactttcatttcatcttgttggccagttgtttcttttggtcatctgtcttgtgaaatgggtttatcgctgggagacaggaaggcaacacaacttcacaatttgctgtctattggtggactgagtaactgatgcacagtgacccctggtgactcactttgaaaaaaaatcagcatgttagtcatggatcatggtgcacatgttaattgcatgatgatttgcggactgaagcattaggggcgaaatttacacttttagcaattacagttaatataccgtgctaactgaaacttgtacagtgttactggggcactaaattaatgcctacagaactatgccaagtgaagactgcctatgctcagcattttcagacagttgttctttggaggagtctttgtctcttgtcttttgactgatctgaaaggccatctttcctatttgcagtcctcacatgctgtcttctgagcattccaagtgtacagaggagatgtgcaggggtcagcagtcattcagccattcaacagccatgtgtgcagtgtccacgctgtgctgagctcagcactgggtgctggcatatttgctggcaatttccagtgccttaaattgctgtcatttttggcttttggcagctaactttccgacatattttccaaaccactgcttatacaatttgcacaaggttttaaagttacctctcacttgcacaaatttccactatcttgattgctgggatacacatactgtcaggagcatcaggttcctccggttgggatacagtccccatcttggcatgccaaatggggcagtccctttttaaacagaacaatcagctaatggacacagtctaaacttgcatagttgctggttaattattcaaagcatgtttcattaaagccagtcccatttctcagcatcttctttcttcagtgtttttaattgacctgagaattaccatactctgaagggtgtgccaaagaatcagatgtctttgcctggagcattaaattccactgaaaaactacttcaaccagaagagaggtgtggctagagagagaggttcatagttttagagctttttaaaaattttttaatccttttgagattctttgccattaaatatattaagtagttttggaaaataatgtgtttgcttaagaaatccaaaacactttttataagggagctccctggctcccagtggtgaagggaaccaaacgtttatggatctgggagtgtgccagggactttcacatatcatcatccacaatcctcataatggccttataggatggaaattgttatcttcattttcacagttgaggaaactgaggcctagacaagtaaattaagatgcccaagatcttacttctgtttgatgttagagctgaattttgacgttttagtttgtcccattccaaaatcattatacttttccatatataaatgattgcaaatgtctgacatgccagccaccactcttccattctggtaccattacagacatcactaattgataacctatgtattcaacctgacttttgtcatgcagctgcccatgaacgctgctcagaatggaaaacccagctcaccctctaaatggaagataatgtaagcaaagagattttagggtagcactgatacaagcttttaggccagtgtagccactcactgatgttgggttggaggtgcccctccctcatactggcattttcttatgccctctatttctacattagggatagtaagagagcactgaagcattccctgtggaagaagccacagacagggaagaaaagtaagaacttattaatttaaattctgtctgtttcgccagtgtcttggtttgggttcctctagaagcacacactcagacaaggacttgggtgcaaggaggtgacctaagaagcacaagagagagaatgaggtaatgaaacagagtgaggggaaaggcagataaaggtgcattcttaagcagaacactgcaggggacaacgagggcccagctctagccggggtctcagagagtctgtggaacaggcttcagaattgtcccacgagagaggcaaggaagccagggtattgatccacctaattcagtcctctgcaggttgagggttgctcacatccctccactctcctagaattaaatcttatctgcctctcagtttgtctgtgctggtcctgcagaaagccctccaggaggagctgggagactccagccctggagttgaggagcagtcatcaggacactgcaccagggcagccggggtccccaagggggcatgaagggggcccctccagtatctgtgtgctctctagctggctctgttgggtaactttctctgatggtgatcagagttaagttgatcccactgtcctaactttagaaaatcactgagattctgtatatcctgaacgccacctaatgggatgtatagaccacagatggcctttctttgtggccaggctacattctcagtggttgcagcccagcagcatggatttgaaatttatggtggtggttgattccaccaaagacaacacagagtgttgtgtgtagctcttagtaaattccttgttatcttttacaaccatctcgggcaaatattgttcctcttgacagagtgggccatgttagccagagcaaatgttaccccagacaaccgtgaattgaagatgaaagaggagttgcagccagaataactagcttggaaatggagccagtctttcaacagcagaaggggcagataggaggcagggtgaactcagacaacctttgtgctgaagagaccctttgctgtgtgagggtctaagcagttgctggtagcaaaatttttgccaccaaggcttggagtaagaagaaaaatcatggtggtgacggagtagcaatatacttgtggtcataggcactaattaacccagacagctgattttaatcattgctgtcatctgttgcaatcagctagctgacagaggggttgtttcatcttttccaataagtgaatattcaaagctgttctcttttctctctctttcagcttaaaaaaacaaaaagcctgaaattggaatggcgggggggggtgcctgttccagaaactccttgcaattgcccttcagtcatcttagtacattcatttgtatgtgactttgtctcactggattgtgtaaactaggcagggaataactccgcagatcttactcaacaactcccatgatataaacttcttgggatcctccagtgaagcctccagtatgggggaggggtcagcatgtttagaatgaatgtgtcactagctctgtgctaaattctaaagagacacatagaagaggtggtgcttgatttcacaatctcatggtacagctttgggtgcatttagatttatataattatgcaatgggtgcttcgcctgttggagtgaagcaaggtcatgtggcaacttgtggagcaattcttggacacttgggcttcccacggggttaggcaatcctgctgctcctaagtgcccccaggcaacagacgggatggtatcatttatagaaggcatccagctttgggccggtggtctcatctgccatttcctataggagtaggtagaggaggggacagacctaaagactcacattctctaggggtttgttgggatgtcccagggccctggcacatcctggaaatttcaaccagggagtgcaaatgacctgccacgcttggttgcaggaatctgtcattttcagggcattttcgcttcaagagaggcatgaaattgttttagactctggggtctgatgaaggtgtgcgcagcacaggctcatgttgcccttgccaagcgttacccctgttcccctcagggcctgagatcttctgagcagtcaaattggaatcctctagacttccccaaccctttccatgttgtatttgcttctggcatttgcttctcggattgtttcctggttgttaattttgagtcatcagcatctttgcctgtagtatccgcatctgtacaccctccgtggccttctgaggtcttggcatggggttgaccagtgaggggctgtgtgaagtcaccccactgttacccccatcctcacaggtttcccataggctcttctaatgttgcatgagaacctattgtgggcctaacccagtctggcaggaaaaggagagaaggaaagtgcatggaatggtcctgtccttaaagagcttctggaggagatggagaaaggaggcattcacatgtgagatgaaaacagcaaagcaagacctgacaagcttgataggcctgatgagccaggccacaccgtcctcttccatggtccagtctagtgtgcatgttccatgtctaaatcagaggacccagtgggagacagtagggtgtagtggaggctgtggtgagcacaaaggaggttttcctgtccaacatgaggtagacgttcccctcagggcttacatggcatgaactctggcccatgttgccaggtcttctggtttttaagagaaactggaaatctggctctttatatgaaattggggattttttatgacattgtatgaggaaataatcacgcctgtgcccatattcatcctgactgtagcctctgggctgtgccatcctagtgtgctcccacagagtgacattgcccaggcggccatctactcccgaccccagagtctggcttcatttgtgaggtcacctcacatggtccaggggttccctcacaagtcacaggctccactgaatgttcagtgagtagaggctggggagaagagctcatctgtggggacgcggcctccccacgctcactacattgcttgccacctcaagggaagatttctgaggctgcatttcaggcacagatttctgaggctgcactcaggttgggtaggcacgttttggggacaaaagcagtgagtccaagtgttgtagagtctgtcattcctcagcaacaaactcagcagctttccttccagtttaataaatccagacccttgtggcttatataacacgcgtgatgacaagtaatgataactcacgaagaaaaggaagaaaactttttttgtctttctgactcatgcctctagtgtgggaaatctggtcagggtggccacacatgttccctggagctagaaggcgagattccagaggacacacagcatgggctgggaggtcttttgcttccaccgaggaagatgagatttcacagggaagggtttcctggagttccaggtttctccagggcagcatggtggtcaggaacctgcatcctagagccagattgcctgggttcaaatgctggctgcaccacttactagctctgtgaccttgagaaagttacgtaaactctctgtgccatacttctttcatctttaaatgcaggtaatgagaatacctctcacacagcattgttaggactaaagctgcttccagtactgtatacaaaaggaagcatgcatctgccttgccctttcccagaagtagtaaatgtttttgattcactgggtggggatccatgtggcaatattatttataagggatagaagttcactgactgtcattacccaacagacctcatctacccaggcgtgtttgtacctcatctccagggctaccctgcaaagcaggagatgtatgtattgttcctctgccaagagtccccaggggagttgagtggcttatcacggtgacccatcagtttaactcttgctgcctgtcagtggtggctgctgttgagaattccctccgctataggatggagaggtgctctctttaggatgatcgtggctgggctgtcccaatccttgtcccactgggcctgtgccctggttgaaaaccaaagatgattaagatttggagtgtcgttgagagagaagtgtggacttccatggatgtctgtttagccagatggatttccatctttgtcctctccaggtggcccaaagcatgggtgaagaggaagcatggtgccactggatggtcccaggaatgcttgggttcaagctcagatggagccattaactggcacgtggccttggggcaagtcattgtccttccaatgccatacttagtttcttaaaaagaggtggactagatctgtgctgtccaatacgggagccatgagccacacatggcaaccgagcacttgcaatgtcgcttgctagatgagatgtgctgtgagtataaaatgcacagtggcttttaagggcttagtacaaaaaagaatgaaaaataccccagtaactttttatcggtcaagtgcagtggttcatgcctataatcctagcactttaagaggccaaggagggaggattacttgaggccagaagtttgagacatcctgggcaacatagtgagaccccatctctacaaaaaataaaaataagaattagctgggtatggtggcacgtgcctgtagtcttacctacttgggaggctgaggctggaggattgcttgagcccagcagttccaggctgcagtgacctatgatggtggtactgcactccagcctgcgtgatcgaacgagaccctgtctctaataataataataataataataatagtaattttttatctacacagtagcaatgaaaaggaatggagcactgatgcatgctgcaacatggatgaatcttgaaaacattatgatgaattcataagcaattcagcaaagcccacatactgtacaattccattcatatgatgtgttcagaacaggcagctccatagagacagaaagcagtttcatggttgcctggggctggtcaagagggtaacagggagtggctgctaatggatgcaaagtgtctttttggggtgatgaaaatattctaaaattagatgatggtgatggttacacaactctgtaaatatatgaaaaaccatttaattgtacacgttacatgggtgaatttttatggtactggctgggtgcagtggctcacgcttgtaattccggcactttgggaggccgaggtgggcagatcacttgaggccaggagtttaacaccagcctgggcaacatggtgaaaccccatctttacaaaaaatacaaaaattagccgggcatggtggcatacgcttgtagtcccagctacttaggcggctgaggcatgagaatcacttgaacccaggaagtagaggttgcagtgagctgagatcatgccactgcactccagcctgggtaacagagcaagacgttgtctcaaaaaaaaaaaaaaaaaaaagagaattttatgatacttaagctatgtattgataaagctgataaaatagtttttataattattacatgttgaaatgttaatattttggatatatcaggttaggtagaatatattattgaaattaatgtcacctgtttggttttactttttaatatgtctgctagaaaatctggaattcatggctcgcattagatttctgttggactgctgcaccgaaccctctctaaggaccttcctagttccaaaattatattcttccacaaaacgatccctaggtttggacttctgatgactcatctggtatcatggctatgacccaacttgaaaaaagttcatttgggtctttttgaaaaccatttgcaaaaataggtttttaaagagaaatcctgaaaggaggcacagagtcacataaggcgagcccaggagctgggaccatcactttctcctgcctccgtaagcagcctggagccatctacagctgtggatggggctgtttcaaaaaatctatagtctaagcctgaacagcggtttccttaatcgatcctcctctcagacggttgactccgctgagactggccctgctgggcatcaggcccaggagaatgggcagtaaattcccagctggcgtcagccaagaacaggtgcttgggtttctcatatctttatggtctggggggagaccagggaggtgcctttgaatccccaaaaggctcaatgtcaaaacacaaatctcggcctccagttgtacctccaaggagggctcaggatgatgttgggaagcatctttttaccttagttctcctgcaggaattaattaagaatgcctgttatgtttcctacctttttctgggtgctggagggaaattcagaagtctcacttatatctcttttcagagcagcttgactcctgcaagaaccagagtgtgttcatgtccataaaaaccaaatccaaccaaacaccctccaaactcctggatatggtgtgtatttccattgggagcttgagtctttcctgtttactccttctactgcttcttttgatttttatatttttagagatagggtttccctctgttgtccaggctaaaatgcagtggggagatcatagctcacagcagtctcaaactcctgcacgtaagccgtcctctcatctcagtctcctgagtagctggaactacaggcacacgcatcactgtgcccagctcacctgcttcttaaaggctggtaagagtctgagccctggggctgtgagcctttatcaacctctgttttctgcagcacctgcactcaggtagtttcctgtttggaatgccgttcctaaactggcttacctcccttttcacctgttttcatgtaaacagctgatagaagcaccgccatcctggggaggcccagctgcaagctcctggaggcgggcacctttgctgcctctgccctcacagctcttcttcccaccccatgagctcttcttccccattccaggctttgggcaaaggcaaggggaagagagcttttggtaaaagccactctgaacatttttccagaaaactgggcaaaagcaaacttctttgggtactgggcatctttttagatgataattagaaatacagaggaatagtaataaactataatgatggtggggtgccgtggctcacgcctgtaatcctagcactttgggaggctgaggtgggcggatcacgaggtcagcagttcgagaccagcctcaccaatatggtgaaaccctgtctctaataaaaatacaaaattagctggttgtggtgcacgtgcccataatcccggctactcgggaggctgaggcggaagaatcacttgaatccaggaggcggaagttgcagtgagctgagatcgcgccactgcactccagcctgggtgacagagtgagactctgtctccaaataaaagaaagaaactataatgatgaggcagatataaaagtgaacattttcctgtggcttttccaccaagcactggcttttcagagaactccagagaacaagcagcagacaggcagcttgtgcagggtcgatcaagcacaagataaggccagtgtcttcaggaatcagagtggtttgtgagacacttaagcaaattgcattcaggccctatctccttctggcaataattcaccagagaaatgagccatttcactagaagatttccattttaatattagcacagggacaagccttgtttcacaattaaattagagccaggtaagttttctagtaatagtgatatctcgaggaaggattgaaaatagagctgctcagagataatttgcttctgagccaagttatttcatggatctcccaggaggacatcttgctggtatggctttgctactgaggggaagccctccaagcccctctgatgaaaagataagtcacactgcaggtctaagaggaaatgaaacgagtgtgcagcttgagagacagcgaggtgctgggacactctgactccaccgtacagatgtctcaggagcaaaggacccagcatgcaggagctttccttctggaatgggctgcttccgtccgcctgacacctctaggatgttgtcttgtcaacagtagatgtttgtcatatgcttggccatgtgttggcaccatgtcactctgctggtgacagttcaggaccagaggcctttaatcatagtagaaacagtctcagaagtggagcactgctgagtggcagcgacacctgaagattggcgaccaggcaaggtgatgtgaccacagtggccacatggcagccagtcatggccacccctggaggggttcatggaacacatcgagcttgaccgcagcccttgctgttgcattgatctttcttcttatcaccctcagatactacaagagggtgttatcaatattaatgtaccactgagatattggaaacattgtttctcccccaacattatatatgaaaatgttcaaccatacagaaacatcaaaacaattagacggtgaacattcagatacccaccaccaggatttcaccattaacatttcactctatttatagttttttccccctgtgctatgggaaaatctctttttaatgtttctatcatgttttccttttaacaaagtaggtctctccctcccatgtctcagatggaaacattgaggggaagatcatgccaaatacatagcatgttagtgaagccaaagaaaaagaatccgtatgccctgagattaaggtagcaaaatattaagggaaggtctctggagtgggatctggaaggtggataccaggcccagctctgctgctgcacagcctgtgaacctgaggtgatcaacttcatcattgttattttttctttttctcttttttcccattatattcaagatcacctctattctgccaggatggtcctaaggctgacattgggctaattgttgcctgcagtctagtcctatgcagagataacaggtagcctgcgacctttggcaagttgctggactcgattctgagctattgatttcttcttttggaagtgaggataacaacacccagctctcaaagctgttgtaaggttaagtaaggtgttgagatgcaaaaagaaagtactcaaaaccatgcccggaatgaggtcagcatactcagcatggcaaatattatgactcctagtacacatattcccttgccagtgtccagcacataatctccctgagggtaaggtaagcactgctgaagttagagctgtgttgtatttagaaataataatagtagcaagagcagcagttattgtaaagtaaaactgaactgaaaatgaaagaactcgagatacaatttctcagttcacaacatgtgcatcctctgcatgaatttgtgaaaagaactgctgcacttgtctctatagaagagcgtgtttggtttactgcttcccaaaaaagattgaggctatgagactgctgtcctcctctgccaccctttgcagaaggcctgcgaggcatcattgctgtaggcatcattctcagtatgagatgtggttactggagctctgccttcccaagttaggtaaccccctccggcatggaccgacacgctcctcttactcagtgacttcctgtttatcatctggcggtagacagcctgtcattggagaggatgggatcaggtcgagtcacagattcaatgtgtttctaatgggaaaccgaatcagggttgccttggaagcaggacatggcaatgaagactttctatagcccctcagaagccccagcccctcctcatgaggctcaacccttgcttcaagctgccttgcaaatcagacaccacctttcacagtgccttttctggcttcactgaacctctctgaggcaaggaatccccttggaaagatgggaatttattccagagactcctcgttctggtctgtcctccctctctactgcagtttagagctgagaggtgctagagctgactgacaggctgtcctgatggagacatgatgtgaggtaatggacaatggacccccaagaagggggatggggactttgtggtgagcattcattgtcccagttttatattttactttacttttagagacaaggtctcactctcttccaggctggagtgcagtggtgtggcatgatcacagctcactgcagcctcgaactcctgggctcaagtggctcccacctcagcctcatgagtagctgggactacaggtgtgcatcaccacattcagctatttttttttaatgattttttttttgtaaagatggtgttttgctgtattgcccaggctggtcttgaactcctggcctcacgcgatccttccacctcagcctcccagagtgctggaattacagacgtgaggcattgtgcccagccttactgcccttcacaaaaatatctgtgtccaagcttgctcatatatggaacagtccacacctgtgtagcgccagcttccaggaagaagtttatgcattcgtaaggccacgtaggtccgaaagttgcagagcagtaacttaaaccaaagtctggtgtttctcatgacaatgcttatatcttcttaacaaaaggcttaatctgacatataagtcatgaggcttcacactgtcaaaaatagaaaacaatgcaaaatgcttgatgtattggagatttatcagcagctgtttctgcagggagtgtgggtgtcaaggcaggtaggatcaatgggacagtgatgtcatcaaggacccagtgttgttttctcctttccctcccttccttatgttagcatcattcccaaagaagcttcctccatggtggcaaaatggctgcagcagttgcaagcatcgcctctatacacagaaagagagagaggccgggcgcggtggctcacgcctgtaatcccagcactttgggaggccgaggcgggcggatcacgaggtcaggagatcgagaccatcctggctaacacagtgaaaccccgtctctactaaaaaacacaaaaaaattagccgggcgtggtggcgggcgcctgtagtcccagctacgcgggaggctgaggcaggagaatggcgtgaacccgggaggcggagcttgcagtgagccgagatcgcgccactgcactccagcctgggcgacagagcgagactccgtctcaaaaaaaaaaaaaaaaaaaaaagaaagagagagaaataggacatcagtagctctctctgataaagagggctttattctcagaagccaccagcaaacctcccctaccatctcattggcaggaatggggccacttacctctccctgaaccagtccctttggtcaaggagatgccatatgctgattcccccaattgtgctacaatgatgatggcccatccctggaactaaggtaaagtcaggccaccccttctcccctttctccataactttctgctgctactcaatggggactggtggaagggatcttgagaaaaagacaatgtgtgtggtatctatgatggggacatttactaatcccacccactttacactaactactgctcttgctcttacgattatttctgaatgtaatacagctctaacttcagcagtgtctaccctctgtgagattgtgtgctgggcactgacaaagctgcgtgtgtccttatagtcacaatatttgccccgagccatttgccctttcaccacccactcatcctgctgccatggagtgaccgtatgggattccagaagagacagacacgcccctttgttcctagaatccctcgctccatcacccactccagcctttgtgtgtgtgtgtgtgtgtgtgtgtgtgtgtgtgtgtgttttctgttgacccccccacgtttgttcctgtttctttcacttttagaaacaatggaaaaggattttctttctggcttcccatcagatgacttgctgaccttggctggtagtggctgcaatgagcagggtagctcacagcattgagaagggaacagtctcatgtggctttggagagagaatgtgggctggagagaaggaagcagaaagccacgcaaagagcaaactgtgaagaatgagacagaagccctcagctaggggcacacagccaaacctacatgctgaatattgcttgttttcaaggggggacgttattggaagtctgcacttagataccagtgctccttgtcaggagtctgaaaaataaaaaaagcctgattatttaggcaaatgcctaatcaattagaaatataggggttcactagggatgagagtgagagaggcgttgctctctggctgaaatatgcaaagcaagcctccccgtttctcaggcgcaggtggtggccaggaaagtcctgcttgcatcaacccctcctggtctgactgagccacatcctctctcctttccctgccttcccttacctatcagtggatctcagactctgggctgaaactgagagggcatggatctatctttctttccattcaaccttgctattctcctattgctggtttcagttccaacttggaaagttgcaagcaatgggccaaagaataggaaaaagtgagaagaataaagtggctttgtgtttaaacgaaagcttcactgcctatcctcccctcagttctgtctttctcactgtgaggcatcaagaggatattttagttctggtgtcaagttccaatggtgaaaggagaagagagaaacattatcagaaaatctatgggccaggggcggtgatggctcagacttgtaatcccagcgacttgggaggttaagacaggagttcgagactagcctgggcaacatagtgaaatcccatctctaaaaaaaaaaaaaatgcttactgtggtggtgcacgtctgtagttctagctagctaatttccaccactacactccagcctgagtgacaaagcaagaccctgtcaaaaaaaaaaaaaaaaaattatccacttctatggctctggaccaaacacatcttcccacttgttttaagagacattgtttccaagatgaggtcaaggttaccttcagggctgacatcacttggtgtccctcaagacagaccctcggctctcctctggtgccagcctcaggtgccatgggcagttcagtgtaagctcagactctcattgcaatacagcattgccccaagcatacgctatgtgtctctctgcttcctggctcagggccttcctgagaggtgggagccagcttgactcactcaaaagtgcagtctgcccagcactttgggaggccgaggcgggtggattgcctgagctcaggagttcgcgaccagcctgggcaacacggtgaaaacctgtctctactaaaataaaaaaaaaaaattagctgggcatggtggcatgcacctgtagtcccagctactcaggaggctgaggcaggagaattgcttgaacctgggaggcagaggttgcagtgagccaagatcacgccactgcactccagcctgggcgacagagcgagactccatctcaaaaaaaaaaaaaaaaacaaaacaaaaacgtgcagcctggactctggggagtttgtgctcctggagcaaacctcacctagtgaggaacggaagccacagcctcattcttcacgtggacaattctgggaagcattctcaatgcatgtctgagcttccagagggatcctggtcttgttaccagtggcagcaacctttgtaatgcatgtttatatatgcttttcccctttatctgtcttgctttccactttctttcactgtttcctgggattctctccagaataaactacttgcacccaagtccttgtctcagacttggctgttggaaaacccaaaccaggacacctttcaacgttgcaaacactatattgcaacgtaaagcattactgcactactacaatgacatctgaggcttttgtttgtgtgactgagccagcctctgctgtcagttggcccaggctagccaggtattttggggggctaggtgtcaactgtcttgctccaccatcagtggccagccttctccccttgtagcttgtacttgaaacttttatgtcccatagccatcttaattcacaatttccccagggctcttagagctttattactgtgattcatagaagccacttgagaggctctgtgttcatggcatggggagggacattcatgcaaagaaaagaaatagctctctgcacagcagtgcactacgatggacacaggatgaagccaggaagggctggggaagagcgttactggggttctgtttgggatttcaacagactttacatgggatgggatttttttaaaaagtagaagcatgtatcagctatgagcttctcaggtgctcttagaaaaaagccagcccaatctggctcaggctaaaaagggaatacattgcaacatggaatcgaaaagtttatgattagtctggcttcaggtatcaggggctgaaatgtgatgacatcaggaccttgcctatctctgtcctttggtctgactgtactcacctttatgtgccatctgcggactctcagcctccaggctctcctacttccaggttcaaggtcactgggacagagtgggtgagtctctttctgggagctctgctttgattggcctggctcagttacaggcacctctcagaaccaatcattatggcctacaggatgtgggactttggcctttagttcaggcagcatctttgctggtggtgcagtgggtgggtggagcttcctcccagaacaggtagacttggcaggagggaggggtctctcctaaaatgaaaatctgaggttgattctaaccaagggagaggggatgctgggagggggaagtgcaggcaccaaacttgcagtgtagttaacactttaaatttcccagtggagttttattgaatctctcctctgtgcaagtactggggccaataagaaaaaaaaatgatgtcatcaggaagcttatagtctaataggggaaataagaatcatacatagataactgcaatgtaataattgtttgaaggcacatttcttattactctgtgagcagatgaaacgtgctttctcactgttcacatggtagctgctctttcttctcctcacccctagagagtcccgatacttggtacttttgaagaaaggtgttccagtcaggattgtggagaagaaaccactgtatttcttttccctctgcctgactcattggtgataactgtactctaggcatgaattaagaaaagcccagaattaaggaaagactgatttcctgccctgttctataatggcagagacaagacagcctgagagaaaacagcagacaattttatactcatactcataaataaattggactgtttatccaatcacaaaggatggaagtggcagtgattttgagaagccaagtgatgtagagttgtcaaattctactcaattggaaacaaaaaagtgagttttaaagagaactgaagaaacacatttggcaggtttgcaggggcaaatatattagatgtatgaaaaatacaagtgttcggagtatatcaacagagcctgaggcaaggcatatgtacagctggaatggactatgaagctgtgatccttaggaaagtatattttttaagaaattatgtttaagaaatattgtaatatacgttatgtatatatatgtataatgagatattatttttaagccttatacctatctttgtatttgtaaaattttatatttaaaaaagtggtctcaatattacataaacttcaggtcccataaaacctggatctgccccagatttttatatacaatgaaagataaatgtaataggaataaaatagcgatgaaatgaaccatttaaaaataataattatattttaacagaacaaaacgtggatttttctaaactatgatgatgttaatgttgttatatttatggtagtatcttattgagaaaacatgatagaatatatttaaccattttgaaaatattagttccatactttgagatacagctaacagaaggtctgcttattttaatttaaggttgtttattttaagtttgaagtttaatggctgtcctacttgtaatagataattccccaagatatatagatccaaatggaagaaaagcactatgggctataactactaaatcaagatattaaattttcagtttcattcaccaattacccaaagactgttgttaacatcttcccatcttttctgacttcagtagattaatcttgcaacttttcagaaggtgttgcatttacatatttctaataaattgatttataaaaatccatttttttaaaataaaagacattgaattttaatttcaattttctaataaaagtcattgaaactctttgggaatttttaaatcaggttatgtaattttgattccaaatttttaagtggaacatacacgtttttagaatgtactgatttttatcattttcttgatatgatttatcatatgaagacataaaaagtcttgatatttattttcaaaatgctctctccatagagcaaatttctttagaaaagcttactctttcactggttgttaaaaagtcaccttgagggatgtggagcgagggcagacatggggggcagtgtgttttctgaaaatatccgctaggtgcacacttagctggtggccatgtcttcccagaaaaggttagcatatttatatcacttgtctttttatgagagagaaatgcataattcatctctaagttcaacagttttaaaaaattatttgccaaaagacaatcaatggacatgtgcatggtgtaaaaagatttcatgatcatgtccccatctcatttcaaaatattgtaatattttaatatttcaaataatattggcaaatctgctcaactgagcccatgtaaggtgcatcatgctgtgataataggaaagtaggtgagctaggaagggcaccaggtccatcctgtgcttttccttcaggtccctcacctgctgtgggcaacaggtgcacttctattatgtaaattatgggatatgctgacaagtgcactcggtgcaggtgccattgtgaattcatattttaaatattaaataaatatgtatttcttatttttagagtggaatgtgatataaaggttccaatattttctttccaatctccaataagttatgtagctcatcctccagtagcacacaattctgaaggtgggggaccctaccagcttttgaacatattattctaccatagatttaataaaaaagactcttaaagtccaaacgcaaaggaccttagaggtcagctcattcatgctttttaatatccagatgtggtaatcgggctaaagtgattcaacttctccaacagcttaaagttcatgatagatctgagactagaaacccaaattgacacatcaccaagatgacaaatttctgctatcataagtccatgtatcttcccatggggcctcatgtgatttcttggtcaacttgagttgtgtttactttaaatcctggttgggatgcttctatgccatcactatgcaagatcactataccaagtcactatcattcttttggctaaaaggggttaaggctagttttcagtattgatgctcctttccattcttttctaccagtgagactggctggctttcttcttcccaggcaaagaaggaggctagaagaaaataaaagtcagacaaactccatcttctttgtctcatcagaatgtttagtaacctttatctaaaggccattgcactttcctttgtctcctcttgccactgcagtcttctgacagattggggttctgccttggttcttggccttggaataggggactcagattatgggataaggccagtccttagtttagtcactagccacatgtgtctatttaaatttagatttgcatcaataaaattaaaaattcagcttccagttgtatagtcttatttaaagtaaataacagccacatgtggctggtagctaccatgttggacagtgcaaatatgggacattcccatcactgcacagggtccttttggactgcacagacctagattgatcatcatggtatttgggagtttctgcctctcaaatgtgggaaattatcctggggagtgtttcaggagctcagaaggggataggtaaccactcacctaccagatgtgtctctgttaatttcccagtattccctggcatgttagatctcaggccaggtggtcaaagagtagcccaagagtgataacaagtagcatttaactgacaatttctgtctgaaaggcgatttcaatttctaggccagaggcccacattgtttccattaaattgtgggtgcacctgttgccatctgcccccctttgctcttccctttccccttctttccagcaccctttgaaagctgaaagctgtcttcattgtgagacccactgcacaaacacctatacaggttgagttgaattggcttcctgcacttgagtgtcattcagtataatggtagtgggtggggtatggctgacacagatgccccctgttgcctgagaaacgtggttcatttcactctccatcatcaggtgaggtgggcacacaattatagtatttgctcctgaggcccgtataataatagttgagacccagcaggctcattctttcaacgggggttaactgtaggtctacagagttattgcatgaagagaagaacatcctgcatgcataccttcatcatgactcttcttcctgctggacagaacccactaccggtcagaacatcatcttcttcgcttccattcctacgatttctcttccaacggcacccatttcattggggctgctctgtccagcctgattgggagtccctgggattgcttggagctactacacaatgcattgctcctgaacttgcattttcctttctgaaacacagcccagttggggtgcacatttgcatatgcttctagtgactcagatcctttcatgtgtgtgtacattcacttaaaaatgtgtaattgagcccagctgctcaaagtggtgcttggaccagcagcactggcatccactgagaactcttgagaaacacagaatctcggtgcccaccccagacctccttactcaaagtgtacattttaagaaggtccctacattacatgcatgcatgctctttagagtttgagacatatcttagttcaggctgctataacagaataccacagatttagcagcttaaaaaacagcagtttattcctcacagttctggagcctggaagcctaaggtcagggtgccagcgtggtcaggttctggtgagggccctcttctgaattgcatactgatatattattgtatcctcatgtggtggagaaagggctaaagagctcactagggtccctttagcaagggcactaatcccattcttgggatttggtggatgtattctggtcttattacctaattacctcccaattgggagttaggatttccacatatgaatttgacaccaacattccatactttgtaagaagaaaccccatattggacattgtatgtatgtgagtgtgggagagagatagagttagagggggagggggaagagaaggggtggaagaaagagagagagagagatactagaagagaggagagagagaggaagggtcttcatcaggtggggtcagtcaacatccctgagctttgagctactacagattgtgaaacctggggaaagacatcaataggcaaagggtggcaggagagcttttgaagtccagcaagggccagaggaagcggagcctgaggagcaggtgttgccttggggctgagcttgggcccttgaaatacctgaagaccatcacaagaaaggcaggctttgagcagagaactcctgggctcagccctataggtcattagaagaaccacatttacgttatttagtagttcaatggagaaagatagggatgttctgaaaagagaaagctctgaaaccaggatgctgggacttgattttgtgaagccttctgaagcaatttcaaaatgggaatgtcaacctcactaatgatcagggaaatgcaaattaaacccacagtgtgatactaccttactcctgcaagaatggccataattaaaaaataaaaaaaaaaaaagatgttggtgtggatgtggtgaaagggaacacttctacactgctggtgggaatgtaaactagtacaaccactgtggaaaacagtgtggagattccttaaagaactgcaagtagaactaccatttgatccagcaatcccactacttggaatccacccagaggaaaagaagtcattatatgaaaaagacacttgcacatgcatgtttatagcagcacaattcgcaattgcaaaaatatggaatcaggctaaaagcccatcaaccaatgagtggataaagaaaatatggtatatatgcaccacagaataccattcagccataaaaggaatgaagtaatggcatttgcagcaacctgggtggagttggagactattattctcagtgaagtaactcaggaatggaaaaccaaacattgtatgttcccactcataagtgggagctaagctatgagggtgcaaaggcataagaatgactctggggacctggagggaagggtgggaatggggtgagggataaaagactacacattgagtatagtgtacactgctcagatgatgggtgcaccaaaatctcataaattaccattaaaaatcttatccatgtaaccaaaaacctcctattccccgaaaactattgaaataaaaatttttaaaaagaggactgttggcagatacgggagaaagcgtattcaggtggccactcccatgtggatgctgaagtatcttcagcaggggcttaggcccctctccctttctccatcagaacttctgctttctctgtgctgcccgcccagccactgggggtggaaaccatttccctgatccttgcagccctctgccaggcacttgcaggctctgcagcctccctttgctgatcctgccaggagggttgcccctcagggtctgggagcagtaactcagactccagtggtctcagtgaggggccttcctggtcctggggatgttgaagactgcatattgggctttagagatggagagatcaagctgtgcactgtgccgggaactttgaaggcacgcaacaatgtctgtgagtggagctgggataaaataggtaagcacaggctgtcaggcttctgcagaattgctgggcacatgagtcaccttgtgaaaatgcagattctgatgcagcatgctgcctgtctcacaagcttgcaggtgatgttgatgccgctggtctagggaccacactttgagaagcaaggctgtcatgcagacagttttgtccagcaacccagaaaatctggattctgtctcaagcttgccactaaaattcttgggcttatcatttaaacttaatccccaggtcaaggggcatggccctgaggggtgggacccatggacctgggatcttttctgtacgctgtgcctccctcctcccttggtggttcagtgattacccaggtggtagctctaatgaagtgctgggacacaatggctacagcatccaggctgtcactttgggaggtggggagacacagctaagaaaaaaacataactgaacttccctggagcttacaacctgcgggtgggggtcagggacgggtgatggagtaaagatggacaggtttttgtgaaggaagtcctggagggtccaggaaggcttcctggaggaagggcttccctctagaagaagtgggagaatatgtgggctttcccatctttgtgccaccctcacaaccagcttgcctcgatctgcccaacaatcatagcagaatctgcccttgggaccagtttggacttctggctcagggctttggtccaggtgctttgggccatcccttgttcccaaggccacccttgccaggggctcagccagtctcccctcctcatacctaacctaggccagtgtgggcgaggccatgtaggggtcggtgtcatgtcggacaggaaggcaaagggattttgatgggaagtagagaaagagccaggcctctctttgccctcccataggggagttgcactgggactggtgatggggccattctcccagggtgcaagacacaggtgaaccccacagcctcacatcagagccctgaagtcccagctgctggcttagccacccctctccctttctccatcaggacttctgctttctctgtgccgccagcccagccactgggggtggaaaccatttccctgaaccttgcagccctctgccaggtgcttgcaggctctgcagtctccctttgctgatcctgccaggagggctgcccctcagggtctgggagcagtaactcagactccagggtgcccagggatctgctgcggatcttgtgagatgcagattctgactctggtccagccccaggaggtgccaatgctgctcctcctctgactggaagacagggactccatccagaagacagaagatctccaagccacaggaggccataggttctgtttaaatcctcttccatgagctgtctccacagcctgtccaatgggcaaggggatgctgagaacacccccttgggctgggtcaaggtctccctctaatgtccccaactcagcaacgacaatcacaggcatcacctcttaactggtgtaaatttcttgccagtatcaattgagccttttcagtccctccaataggacaggcctccctttaatccaaaggcgaagaggggagaaggcacgaagtgccctgcctcaagtgggcaggtggctagggttgccttctcccctcttcccctctgggttaaagggaggcctgtcctattgaagggactgaaaacgctcaactttcaatctggttttcctcttggagtggaggtgtagcgccttgacactggtgagaaatttacatccagtgtaagagttgatgcctgtgattgccgccgctgagttggggacattagagggagaccttgacccagcccaagggggtgttctcagcatccccttgcccactggacaggctgtggaaacagctcatggaagacaatttaaacagaacctatcgcctcctgtggcttggagatcttctcccagccaccttctctggatattcccttctctgactttctggaagctttgaggcagttgaggggaatgaatgtatggccctgttagcctctggcttcctcctctcctgctgggttaggagaggtctgtttgggggatgtgtggccctgttagcctccagcatcctcctctccttctgggttaggagagctccttttgggggctgcaacctctccacaattggtgctcctttccaaggaccttgaacaaaagcacagggaagctcttgcttcagctggaaaacccatgagaaaaatctacctgtacgaagccagggcctccactgctcccctcttcatccacagagggtgaggacaccaggctcatccttccaagacttcagggggaggggcaggaaaggggtcatttggagagcagtgctgctcactcaagtctgcagaaggcgtccgctggctgcgggcttatgcaaacctgacctccaaccccagggtgaagacccgggttgtacagagtggaggcagctgtgtaaactgtagggtggggtatttatagccttagtgaggagcaccaaaccagcctagagagcctgagttagtgctgccgcccttggctgtgtttcttgtgccgttaactgagttttccagacattctttctccagtgttgcattcggctttacaagactcagtttcttcatctgcaaatgggaggctgttgccatggccctctgagtgcttcagccagatggttctctgcatcccagttttcaaaaagaaaagcagtattccagttcacagggaggggagagttaatacgtcctctcaaaaggagctgctatgcccctaaggccacttccctgggctcctggagctctgggacaggtgagaaacacatacctgagctttgcagtcagctctggcctagggtcctggcttggctgcttacctgcatcagcattccctgcaagaggatggagtgagatggtataggaagggtgcttggcacataataaggggcataaaagataattttgctgatgatgcagcaaacttcctcatctgctgccaccgcggtgtctgaaggagttaaacctcttatcagagagcaggcagctccacctctccaccaggcctggggctagtgtttgggaagggtttgcaagccctgtgggacaaggttcacataggagacagtgttagggtgaaggctgctagtcaaggctgtttgtcagggggcatgcagggagatccattcttggtgtcagaaatccttgggctctctaagccccagttgtggggaggagggcggtaggggaggaggagggaggagagcacaaaagggtgagcacacagctctgtaatggaaacttggcgtccagcctcactttgtgtccttccttagtgcatgcggcttgcttttcgagttgagagcttggtttcctccccttctagccaacatcccgtgctatccccatggcccactcctgtcccctcttcttagagcctgcagtcctgcagactgcctccacccgtgacatgtgacatgtgagcctgctgcctcccctcttcatcccctacccctcccctgactaattaggccaacatgcaacttccagggcctggcagatgaggagccaagaatgccatggacaggggccaagtgtttttgttgacattgctcaagtatagctttgtggagcggcctctttgctgtagcagagaaatccaaggaagctggagaggtgagcgaggggagagcagggaggatagccagtgtgggcgcctctccgtatccccttcaccttcccaccctccaagccttcccagctgcccaccctctgcccctcctccctaagtgcaagaagatagccctccatgtcataatttgtgggaccagcccagtctctaggaaatcacactgagcagagtgagttgcacgcagtgggactttagaagtgtcttatttcttcgtttgtgaacctttcatgggggatgctcgtcctcactgctgttcccaattcagtcacatgtcccttaacagtggggatatgttctgagaaatgcactgttaggcgattttgttcttgtaccaacatcacagaatgtatttacataaatctggatggtatagcctattgctcctaggctaaaaacctgtacggcaagtgactgactgtactgaacactgtaggcagttgtaacacagtggtaaatatgtatgtatctaaacatatctaaatacagcaaagggacagtaaaaatatggtgttaaaatcttatggggctgactgtggtggctcgtgcgtataatcccagcactttaggaggtcgaggtgggaggatcacttgaggccaggagtttgagaccagcctgggcaacatagtgagactctgtctctacaaaaaataataaaattagctggatgtggtggcatgcacctgcagtcctagatactggggaggctgaggcaggaggatcatgtgagcctcggagtttgaggctgcagtgcaccattgcactcctgcctgggcaacagagccagaccatgtctctaattaaaaaaaaaaaaaattgaccactcttatatatgccctccgacgctgacagaaatgtcattttgcagtgcatgactgtaatttctgaggaaacaaccatctttgaaataagaccagtgagacttatttacctcttcactgctagcctattataaggtgcaggctgcattattgagctactttactatagctgtataattaaaccaggatggatttcatcctatcccaggatctaccaagaatttgtcctttgaggtcactatacctgggttcaaatcctcattctgctacttgctcactgtgtgaccttgggcaagatatttaacctctctgcctatcaatttccttatttacaaaatggaactagtatttccatgtagggttttcatccatgaagatgaaacatggtgaagaatggaaaggtttctgcacatcacagacattcagtgaatggaagccatgctaactacgaaatgatagttgatgtagccacggattggctctgatcttaggcaaattgcttatcctctgacttatgtactctaaaagtaaattgaccctagaaccaactgcctcttcctagctcagcaggagttttgtgaggacaaatgaactgtgctataatattgtcaaacttggttctctgtgggaaggaaatggatgcaatgcattgcttcatcattcttcttttctcagactctggtctctgtgttattacatcagccatcagtggtcaaatacacttttgttgagataaaagtttgcaggttttggaatccagaggtgctgccttaagagtctaattcctgaagatattgaatcattatgtttaaaaatcctctaattttctgctacaatagctggctttatttttacatctcttaattggtatcagcttttctctcagaattacggaaccatggaaacttggcatatgaaggaactttggaagtcattggaagggatactcctgcttctttttaaatctttggggtcttcctgagcattaagattacagtaccacaaagcatttctccttgacccagagaacagtggaatggccacgctgctggccacagcatgactctctctttaggtactgtgtagatgggcagatgccgtggtgctcgaccgatattacttggttctgacctcttcaatgccagctggcacagtgcagcttctagcaccttcctgtcattgcccaaggcctttttctgggcatcaccttggacatccatgtggcagattagaaatgctgggggattatgtcctctttcatcagcttcaaccaatgttagactaggagtaggtggatgaatacctaagcttcctcacatcttaggtgtctgagatgcatgtctacgctggcccccaaagctatccagagagatcagtttctagttattcatgatggcaactgacttaaagtgcacctactattagcatttcctgtcctactctgctcttctaccgattcttcttaggatcacctcccgtataaaccaccttctcacaaatccttctctcaggggctgcttctggggaaacccagcctgaaacagaggggatgcccttctccacactttcagattatttgtgataatatgggagtttaaggctactaaccttaacgtttcttcatgaggttttgaaacttttttgtctctgttcatcactattcttaaccattagaatccaccattcaggttatccaaactacacaaatgccttgctttaacctcgaattatctttgatattgtcctcataatctgggctaagctgatacatgtggccgccatgtagaattttgtatttcaagagtctgaaattattgtttcttttcattagactccacatccttcctccattttttggggaaaaaaacctggggggctctcctggatgatatgcataaactgtaatttgatatcttgctaaatttacatgtggaagcagggtctgtgtttgaggaagacctcagttcatgagctactgatattatgtgcatcatgttagcttaggtgaggtgcccacaggcattgtgatttccagacacttccatgagtctcactttctccacctaaaaagtgggactaattatttcaacacatacctactgagtacctaccctgagccagcagtgatcaggtgctggagaggcaatgtccacactctccttctttcttgagcggtgttgtgaggtttgaattcagtaacgaaggagaaatcatttgggaaactgaatcactgtggaagtagaggagagggcagaatgccctccagctcttcagtgaccacttcagacaccgtgttggtgtggctgggtgcaccatgtggccttgtgtgaaggccactgggcccatgggttaggcccacgtcttgtgtttccatccgttttccgcccgcggcaactttggacattcaagaggcagcattgcctcaggtcccttcttcagtgccaagcccctgggaagagccacttttgcagcttggcttactgtctgtgtctccccatggccccatgaagccaggccccacctgtcatgtttctgccttcatcttacctgatctgtccatggtggtcaaggctgttggctacaccttccttcctgaaattctctttctgcttaccttccacgacacctgctttccttgctcttttccttcctttcatgatcccttcctgtatccttttgctctgtctcctctctgaaggatattgtgttcttccattccttctccctggtgccccctcttctccaccgggagaccccattcatatatgtgcctcccacccttccctattgctgatgacttccctgaggcttgctgtggctctacttttctgcccgaggttcctccactcacatttgcagcatttctaatctgccacatggatgtccaaggtgatgcccagaaaaaggccttgggcaatgacaggaaggtgctagaagctgcactgtgccagctggcattgaagaggtcagaaccaagtaatatgggtcgagcaccacggcatctgcctatctacacggtacctaaagagagagtcatgctgtggccagcaacgtggccattccactgttctctgggtcaaggagaaatgctttgtggtactgtaatcttaatgctcaggaagaccccaaagatttaaaaagaagcaggagtatcccttccaatgacttccaaagttcctccctttccgtgctctgtaggctcttcaaactcagcatgccccaaacagaatgcactgcactggccccttcagtgtgctctttagcctgtgttctttcttctggcacctccaaccccacagtcattgcagccctgagccctgttacctgctctcccaacctactgtttcctagttcgtgccttcatctcttgttcattgaaaacatgctgtgtggcactcatgaacctatgctttggggatggcaaattatgtctttgcttgataacccccagaagcagatcctgatgtatgttcaatggtgggtggttcatttgggggctgatttcaggagatactggcaggggctagacctcggtgggctggagccagctcttattgactcagtggagctgattgtgtccatctcttccgaataccattttcaatgatgtcatgtgggcagcttggcattggctacaatgggaatattgacaccacagaagttggccagtggctgcaaaacagggcttttctcccccttcgagatttggttgttaaacatttctcagcatgtcactgggagcagggaattgagacagggaatggggggcagttgatcaagtgtgctttatcaagagagttacacagtagacaactggagcttgatcccactgggaagaatctagaatccagcttagaacatacacctcaaagtcatcccactggtgcggcaaggaagccttcaggcagctagaggcagagtggctgggggtgcaggcggggctgaacaagtgatggctgatcagggcagcgggcatgcagcgtcggcagaggctgaaacccagctgtgaatgatgtgtggttattgtctttgtctccccagagcttgacctcatggacctcgtaggggaagacagaaagtggatgatggcgaggaagctgatgcaggtgaacgacactctgacttccgaagatgccggactccggaacagcaagaactgcaccgaaccaggtaacagtgctgactactcatgggcagcagctgtcattttctctggctatggctgaggaagagccagctgctgtgtgttttcttagaattttaatccagaaagcctccaaagatgtttaggatgggagtctaagaaactttcaggtgacatcctgagggactattaagttgtgttttgacctctgtgttcgttttctactggagctgggggtaagtcagagacagtgacactcctgatgcggtactgagatcagatgtggaggctggtgctgccaagtgagaaaccaaggcaggagcaggatgggtgaggatattttgtggttacctttgctttgattgctttggtcctctttggctggtttttaatcaggaactttgtttctatcacagtagagacacagggattgggccggatcgtcactcacgatgttgaacttcttggaagaggcgaatattaatttattggttgtgagatttgatatctattatgccattccccagaaatatatatggaacattctatctctaatgttactaaacagaaaaagaaaacaaagcagatcaaagggaatgaggagctgtgaggacccagcccaccaagcctcagggacgtgacaggcatccctctggatgaatgaagtccctgaaggtttagacctggagtcagtaaacttgttctggaaagggccagacagtaaatactgtaggctttgcaggccacatatcgcatctgtagtgtattcttaaaataattttttataatgctttatcaatttaaaaagcattcttatctcacaggttgtaccaaaacaggcggtgggatggagtaggtctgtagccatattttgctgctttgacttggacctcgaagctctctggggctttctgtccttgcctggtggggacttggcctcatgtgtgccactgtcaagggcccaggagctcaatgacatgctgatcctacatccaaaggtctgtctcatctttagtgtcagcacggaaggatataaacaatctccattgcagcccaaacaactacaggctgttgagtacagaagacatgtcagagaattgcaggtctgcgatctattgggaagatgggtgggagtgcccttcccaccatacttagactcttaacaatcagctttcaagcaaagctggaaagaattaaaaatagttatctgccctgcctccaccaccaccaccagaaaaacaaaaacaaaaacaaacaaaaaaaataccctatgtagtctatgttcctcaacctggagaatccaagggttactgtggctgttgttccatgctcacaaggagcatttttcacttgaaagtgaagcagcacatgggcagctacgtgagttagaaatgaaaatgggtatgaagggtccaagtgccccactgagggactgaaccacgtgtactttaagaagcagagatttccaaggactagcctgaaaaggcatagcagggaaggcacagcttctgtgccaagaacagatctggtcctgtagtcaaatagttttcaacatctttctccaactaataagctaattaggattaatcagctaatagtattagaaagcccaggtatcacttctggtatgggaaagaatggaatcagacaggacatggtgaccagctctgagcattaggttcagccatatgcagaaccagcaaggatggggggattctgttccctgttgctggggtgtgttttgggggcaggtggttggtctctctgtgagtagcattgctcactgtattgggaaataccgttctcagagtgacagatgtagaagcataaagcacattcaaagtcattccaagagtggaaataactcagcctcacagatagaaaagaaaatgtctaggtagataaaaagaacgtgaacccgggatctgcctgtgttggcaggggccacacagggaaagggaggagaggaaaggcttcaggaggaatatgggaggaagcaaaagcaagctgagtcatgctgcgaaaagcaggtccaaagggaatatggatccaggagggacaatcttgatttccttacctgcagaccaaaagaaccgggcttggtttctgaggcccttgattcagaaccaaattccacaaggaagatgatcatgcctgaaacaggagaagttctgttcaaatcctaacacatcaagggctgggtcagagcccacgtgcttcatgaagcttgcttggaccaccccagactgcagcattcttttctgactgctgctggtataaaatgtctccacatgtgctgttaaatatggacattcaatggcaatttcaattcaagtgaattcaaaccaactaaaattaaatattcagattctcagttgcaccaactacatgtcaaatactcgatagttggatcacagatgacagcacaggtcccaaaacatttccatcatcacagaaagagctattggacagggtggtcagaacttgcagttgtctttggatgtatctcctgtctttccagcccaattgcaaacatctcaagggtgtagagcaaatatgtaaatctgagggccttatctctaccccgggtcttagagtcacactgacctgaagctgtggactttggccaaatagccaggttctcagagtctctgtgtgcttctctagaagttgacatcatcattctgatctttcatgattgctgtgagaattactaataaagtgtggacagcttagtgccctgggtttgatggcactgtagtaggagtgtattcgtgaatttcccaccctctgtcctggggcatcattacgggtggggcacagtgcaagattcctagagcaacattctccagctactccctgcagagcgagtctgtcagcaggccacaccgcaggtagctcaggtctaaacagaccgtcatctagacaggaggcttcagtaccatcttcccatgtaggcaagccctgaagacctcaggcttggcaatgaatgccatcatctctgctgcattgactatttctaacaacaggatcagaacattgccacagacacatgtgagccctggttacctccatgcccttaccagaatgctgtcgaagctggctcctcggtctggactggacagatattttatgaaaaaagttgagagccaaagcacccataaggtcctgatttagaagcatcattttaataatattcatcttctctgcctctaacttgttgttgggtgaaatggttgagcaggagtgaggtgagggcaggttcattctaaaactttgttcagttttccttaagaggccctgggcacaatgaatactacttgtgctggttaaatatagtgccatctgccctcgaaaatcttaaatagagaggctaggaagtgagccctgtggttcctggactctctcccttcctatttatgatgatgtcagcggcagcagtacacttaacagagcctacggagcaggcttccctctgtgcttggaggagtgaagatttacacagggacttgagtgtttggggtgcagtgtgtgtcctggctgtctgagttatggtggcaaggtcacaggcaggagttaatttggcatttgtcataaagtacacccagctgccacttgtgatgtcatggggcttctcagactgtgctgtcagaagccctggctttagatgctattagaggaagcctgtagattcagagactggagacagagttacctctattctggttatattccctgttggggcatgattctggtttgcctctcagattaccatttcctcacctacaaaatagatcttcaactacatttatcccttcccttgcacacatccatttattccaagaaatttcaagaatagaaattcaagaaaacttcttccccttgacactctcccatttcccttaataactgctgtgtttgcagaattccatgccatacctcaagccttcctctactccctctcccctcctccccttccctctgccctgccttctccctttctctctgtctgaaaaccaggagcacagagtgcccagttttggtgccagagaaagcccagggtgctgtcttctgatgacagctgctactttaaggatatattactttatacattttctgctttcaaaaaaatggcactgggcgcggtgactcacgcctataatcccagcactttgggagcccaaggcgggtggattacttgaggccaggagttcgggaccagcctgggcaacatggtgaaaccccatctctataaaatgtacaaaagttagccagtcgtggtggtgtgagtctgtggtcccagctacttggggggctgaggtggaaggatcaactgagcctgggagatggaggttgcagtgagctgagatcactccactgcactccagcctgggtgacagaatgagaccctgtctcaaaaaaaaaaaaaaaaaaaaaaaaaggcatttttcctttgccccttgaagacctagttttggtagaaatttgtgatttttttttttttttctaccttcagaactgcatgaacaagactgactgacctccgggctccaacttttctttgcaattgttccagctctctgtgaatttttaaggttgttttcttagcctgacactgccgacttcatctgaagcctggaaacatttttttttttttcttttggcaagtaacacttgaaattgtttactcagatgacctattaagagaaatttaactttgaataatttgatccatggaaaattaagttagctaaatgtaatattgaagatggtagacaactgtagcagaaatgaattctttgtaatatttatttgtgcactttacagaattttatttatacactttgcagtgtgtctccagaaaaatatatcatcttttggtttttggttccttgatattttaaggaaatgagcttttcctcagagtgctttttccaaataaactttggaagaaggaaaatatttaaaatgatggcctttggtgtgggcttcactgtgagatcactggatttcccttgataaaggatcatcccactctgtctggcttagctgggcctaaggcctcgaaaagtgaagaggatgcttggcctgtgtttcaagaccaaagtcaggctggcagggcactgccctatggggatggccaggagtgcctacaggtcagctattgactggcccgaagcccacagttaacagttaaatgtgagctgcagttgacgagggaaaccgggaagtctatatgagagaagcaacaggaggggaggttcaaggggtgcctgtggtccataaacaagaactggagtccaggcacagaccagcaagcagaaaacatgcgttcagggtactggccatgaacagtgtcaggatcccactgtttggggtttaaactgtgacatcagagtgggctggtttaaaatcagagggctggacatgaccagtctacaaagcatgatagggccaacattgtcatcttttacatgaaaaaaacaagaaccagaggggataaacaaccgcccaaggtcagagggcttgtcagaagtaacatagggccacccaacacccgtgcagtgctcaatacccattaataattgaagagaaaatctgaggtctgcacaatctcgagtagcactgtccagtaggaacaagatgtgagctacaagcgtacttttaaattttctattagctacattacaaaagtacaaagaaacaggtgaaattaattttaataatatgttttatttgaccaaatgtttccgaaatactagaaatgacaaattgcaattaggttaatgtggttattgctgggtttgaacccaagaaagaactaaatttaaagacttaagattcatctgtacattatttcactagcttatgtaacttgaacttctttctgaagttgtaattctcataatgattcaaatcacagctgttgagattcttaagtggaacagatttggaactaatgtgatctgctttttaatttgtatcaaattgtgtgctgaattatttagatagggtaatagtagctgctgtaacagagaagtcctccagatttctgtgttaacacaagagaagtttatttctttctcatggaatgttctagtctatagttgcacctgttgcaagaaggggtccatggactccagaaccttctatctttaggcctttccctcctcaacttggcttccaaggttgctgtgcttctttgcattaaggggaaagagcatggaggatttggggtagcagggttttatggactagatgctcaccgatgctcacattccattggcggagctcagtcacatgacaacctctaacctcaagggaggctggcccatgtacatcagtggaatgtagaaagaagaagaaacaggtttggtgaactgctagctagtctctgctacattaatttcccccaaacttgtttcttctgaaaaagcaaatttcccaatttttctttatgcttatctcattttcaaaagccaaataccaccattatagaaaaatcataacccaaatttatgtctgccaaggctggctatagctcttgctttaatcttcataacaattccctcatcaagtgaaacaattttattctcttttcaccttgtgggggtcatcaatgaggcagaaattgtcccagtggtgccatttgcaaattgcatcttttctttggtaataaaagaaccctgcggaaaataatgaatgcttttgtatagatgaagtcatttggcaattgtgtggaaagaacttgggttctggagtaaatcctaaatcccaactccaccactttcgacctgtgtgatgccaagtggcttcctaaattatttagacctcatttccaccctctgtaaaatgcaaattaagatgccttcttcccaggcttgtggtaatcattcagtgaagtaagctttgcagagcagctgcaaatcatagtatgtgcttaataaattgtagccatattatctttgctgccagaaatacagtggaaggtaggctgatggagatcatttataggaatttaccactctgcaggcacattagaactttgtgggaataagattgttttaatgatgaatagattatttagtgtcattcagcaacaataccacattcttacaggttgggctgcgtgtaggagacatacagtggtattaactacgaggcttctgactaataagtttctggcctaagagtccactatgtaaacaaacaggatgaaatagggagcagaggattttctactttatactaatgaagagtttaaagtctcaggctctagcagaaagggccagacactatttgttttttctagctttgacatccctttagggcatttttattgagacatttttttaaacactgttctttaaaagcagcccaggcagcctaatttggtgagtggtgtctggaatctttctgaaacacaggtaaaggatgataaaactctgctgttagatgcagagattttgtggatctatttgtaaagtcctttagacatttcaaagcattttcacattcattagctcattggaacatgtttggctcttggaataaatacctcaaggtcaggaaaaacggtatgatgatgcccagttgatagattagttagtctgagagcaaagcaagtcgagttaaagaactgagaattcagagtcataaatgcaaaaacaaacatagggattatggtttctagtggcttctaaacccttttcctctaagccagggctcaacaaacaagagcccttggccacagggggcctgtcgactgtctttgtgaataaagttttattggaacacagccacacacatccatttatgtgtttctatggcaacttttgctctatgaaggctgaattgagtagttgcaacacagaccacagggcttgaaaagcctaaaatatttattcttgggcctttacagaaatgtttgctgctgcccctggttccaggctctgtgacagttgcctcatgtgctctgcaggggaggttgaggcaggaatgacatttccaaggtcctctctactctccctgatccttcccccaggtggtgcctgtgccatattgcatatttttaatgtcacccctgggctgggggtctgtgattcaggtactctcccctcctcctgcccccacccactggcacacaatcaaaaaaactccaatatttttcctttcgtatgttagggatctgtttaaaattttatttgaagagtaaaagtttaccccctaaaagagcttgaaaccacgggcctggaacaccccttgctccagagcatctgggtctccagaccacatgtctagtactcattctaccttggaattgctttcctctggggttccacagtaaagcagccacttagggttgtccacctgtactcatggcttgctctgcacgatgacagtttccccagagcttatctcacaggcacccccggagcagtgagcaatgcactcaactgtgtgtagagaccatgggtattacagcggggtgctgggaacacccaccttggggagtggagagcctgcaagagaagtcacctcctggtcccaacacacctctcggctgcactgtggcctatgacagtgataagccacatagtgctgcttcctcctggcctgggagcacatgtggccttggccatgtctctactccctggggttcactcccacccacctggctccccactcctcaatcatttctggagcagcagtgtgcccaggggacttggggctcttttcttcaatctcttactgagattgttacacagataatcttattttgcagatgaagcttcaggtttagagacatgaggggcacctccagggctccctgctagttggcactagagcaaggaccaggactctaaggttgcctgtctcccaaagccttgtttgtgtgtggtcagccttaggtcacataatctgggttgccaggtgggctctgttctgcccccttttaagcgctctcagatgtcttaggaccaccaccaccagcagcagcagcccctgggtgcctgttacaaatgctcatccttgagctgcacctgcgccctactggattggaacctctgaaaggcaggcccagccatctgggttgtaacaagccctccaggggcttgtgaggcacactcaagtgtgaggatccctggcttagctcattggaggcacctgtggagattttaaacccaggtccaccccaggccaggaaaatctcagcctctgggactgggaagcaggtgtcagaggttttcaagcttccagggggttatagtctgagtgtttgtgtccctccagtattcatttgttgaaattctaactcccaaggtgatagtgttagaagatggagcttttaggggaacgattaggtcatgagatcagtcccctcaggaataggatttagtgttcttataaaagaggcctgagagaaagccctcaccccttccaccttgtgaggctagagtgagaaaatgtcatctatgaaccagcatgcaggccctccaccagacaccaagcctgctggcatcttgatcttggacttcccagccttcagagctgtgagaaataaatttctgttgtttataggccacccagtctatggtgttctattatagcagcgtgaacagcaggtgagaatggtggcctgagacccacctcttgcatgggtggtctctgtcaagctggctcagggtagaatagctgggcttgcaaggcctagaatcttcaacaagctggcaaacagatgaataaagggagaccgccagccacatgtaagacaccaaacctgtcttccagcagggtctatgtgtgttcagcactactcccaagccctgtgaacatttgtttcttcactctatcttggagaccacgggttttgtttctaagctttcttgccctgggaaacaccagggtgtgtttcacactagctgcattttaaaatctctttgtattgaagtcaacagggaatgttcctgccttgtcctatttgtgggtctaatcttgccatcgggtcctcagttgcctcagcacttgccactcccacccactcagaagccagggctggccgaggtaacagggcgaggtgcccctggggctgagggcagggccttggggcacatctcccggctgctctctgacactcccaggcctgggtggactctggtgcttcggggtggaatgaggcccagggaggcccaggtaggcctggtctctctccccaaaggctctccaggcctgaggagtttctcagcaggctccatgaacaatgggggtggcctgtctgagggctgtgaaggtcagggatggtctgagctacaccagtgagtgcgctttggtttggtcagaggcaccaagcacagtctatccctggctagtgggccacggccacacctcggtttgtgtgccctggagtaggttccactgaggcccaggactatgttcacattccaccttggagagtaagtttaaataggtacatgtctaggctatcctacggacgcttctgaggttcctgatagagtgtgactcccatttcttttggctgaaatgtctataatagaacaataaaatccttgaactaaagattagcagccttttttagaagctgactcagaacaaaatggatttgggcccagcccagtggctcatccatccctgtcaaaacctttgtgccaggagctcagcctggctccccagccctgggcctgcaggagacctcagggcccactcagtgtccacgttattgggatcagggacactgatatgaaaaaaagaaaaaaggcaagaagctgcagacccctgggacaggctctggaaggagcagaggactgggtccaaagagcaggctggactcagtgaagcttctgtgacctcagttgataaatgggcactcacagtacccaccctgtcttggggtcatgagggaacctttcagatagataaggagaggccacattttgtaattgtaggtacttctgagcagagtgatggatgtagggcctgggcatcacaggcctggggaggacccatgggctgtgggaccctggaccagccgcgtaatctctcaaagccttggttcccttccctgagaagtggggatcattcatgagttggtggaacaaagcgtgtcaagtctttaacacacagccagtgctcagtccctgagtggatgcccattttccaagcacccactttgcaacagtcctgaggggtcctgcaaacggagtctcagcttgtcacacttaagagattgtagttattattcatgctgctgattcctttctctggtttttagggcgtgggagttttctactatgggaggcaggtaaaatgaatttgacaggcactaatactacaaaaacccaggcggaaagtaaaaatagtcttagttgtcaaagcacaggagccagtcacatgaacagcctgtcagtatcaaggtaagcctccccgtggagctttttctggggaacgggaattccacttctgctgaaatcttgttgacttgccctgggtaaatttatagaaaaatcacggatgatggggattttggtctgtaggccgagtatgcaggctgggtgtgtagaatggatagcagtggtcgcagggatgaggttgagaggcagaagcaggtgggaaaggagggtttgatctgcacttgactgaccttcttgtcgtagtctgctcaggctgctaaaacaaaatgccatagactgaatgtcgtctaaacgacagaaatttatttcttacagttctggaagctggaagtccaaggccaaggcactggcagattcagtgtctggtgaggacctgtttcctggttcatggttagcgccttcttactctgtcctcacactgaggaaggggcaagggagccctttggagtctcttttatagatttagtaatcctattcttaatcatcttcccaaaggtcttacctcctaatcaccttgccaaaggtcctaccccctgccttgggggctaggaatttagcatgagaatttggggggaacataagcatgaagaccatagcacccttgcatccgtaggaccattgaggtgggaggctgccctttggacaatatctttccacattccagcaacacagtttccccactgcctgctccattttaaccacaaatactaggccaatttattaaattgagttatttaatactgaatttaaaggaaggagagttgtaacgcagctgcacctccccactctcagccatttttatccaattgccctggtttcatgcaggacattggcccctttgtggaatcattttatgttcgtggctcggaaagggatgtttcctggctgggcatggtggctcatgtctgaaatcccagcattttgggaggctgaggtgggtggatcacccgaggtcaggagttcaagaccagcctggccaacatcgtgaaaacccatctctactaaaaatacaaaaattagttgggcgtggtggcaggcacctgtaatcccagctacttgggaggctgaggtatgagaatcacttgaacccgggagatggaggttgcagtgagccgagatggcaccactgcactccaacctgggcaacataacaaaacttcgtctcaaaaaaaaaaaaaaaaaaaagggatatttcctttaaggatgcccaagcaaaattactcagtgcctggctctgcttagtggttctcaggaggacagaattcctcagtaattcccactataaatatagaattactgtcccatcaatgccacaattcgatgtgctgtttatttaaaattttgcttcctctgtctcctcattcagtctcaagaatcttgcctttaggtccagtggtcccttggtatccacgggggattggttctaggacacccccccacctcagaatatcagaatgcatgggtcctcaagtccctgatataaaatggcatagcatttgcatataacctatgcacatcctcccatacactttaaatcatctctaggttgcttataatacctaatacctaatacaatgcctatacatcacttcatttacgtggattcaatgtagtacttgagacgtggcaaatttaagttttgctttttggaactttgtggaattttttttccaattattttttaatggaaaactctagcatttattcataaaatctataaatggaaatcaaaccattttaattaattactctagtcaaaattacttttaatcaataaacactttttttctttaaagaaaaaatttaattgtattttatattaagttctgggatacaggtgcaggatatgcaggtttgtgctttggtgatttgctgcacctatcaacccatcacctaggtattaagccccacatgcattagctatttatcctgatgctctttctcccccttctccccaacaggccccagtgtgtgttgttcccttccccgtttccatgtgttctcattgttcagctcctacttacatgtgggaacatgcagtgtttggttttccgtgcttgcattagttttctgaggataatggcttccagctccatccatatatatatatgcaaaggacactatctcattcctttttatggctgcatagtattccatggtgcatatgtaccacattttctttatctagcctgtcattgattggcatttggattgattccatgtctttgctattgtgaatagtgctgcaatgaatatatgcatgcatgtgtctttattgtagaattacttatattcctttggttatatacctagtaatgggattgctgggtcaaatggtatttctgtttttaggtctttgaggaatcgccacactgtcttccacaatggttgaactaatttacattcccaccaacagtgtaaaagtgtttctatttctccacagccttaccagcatctattttaacaataaatagctgttgtttcttaactttttaataattgcattctaactggctcgagattgtatctcactgtggtttttatttgcatttctctaatgatcagtgatattgagcttttgttcatatgtttgttggccgtacaaatgtcttcttttgagaagtgtctgttcgtgtcccttgcccaatttttaatggggttgtttgtttttcttcttgtaaaattttttaagttccttgtagaatctggatattagaatcatttcctgagactttgctgatgttgcttgtcagcttaagaagcttttgggctgagaccatggggttttctagatatgggttcatgtaatctgcaaacagagacagtttgacttcctcttctcctatttgaataccttttatttctttctctttgccctggccagaacttccactactatgttgaataggggtggtgagatggggcatccttgccttgggccagtttttaaggggaatgcttccagcttttgcccattcagtatgatattggctgtgggtttgtcataaatgactcttattattttaaggtatgttccatcaatacctagtttattgagagtttttaacatgaagggatgttgaattttattgaaggtcttttctgtgtctattgagataatcatgtggtttctgattttatttctgtttatgtgatgaattacatttattgacttgcatatgttgaaccagccttgcatcagggatgaagctgaattgatcgtggtggataaactttttgatgtgctgctggattcagtttgccagtattttattgaggatttttgcatagatgttcatcagggatattggccttaagtttttttttttgttgttgttgtatctctgccaggttttggtatcaagatgatgctggcctcatagaatgagttagagagaagtccctccttctcaattgtttggaatagtttcagaagaaatggtaccggctcctctttgtacctctggtagaattcagctataaatctgtctggtcctgggctttttttggttggtaggctatttattactgtctcgatttcagaacttgttattggtctattcagggattcaacttattcccggttcaatcttgggatggtgtatgtgtccaacagtttatccttttcttctagattttctagtttatttgcatagaggtgtttatagtattctctgacagttgtttgtatttcagtgggatcagtggtgatatccccattatcattttttattgtgtctatttgattcttttttctttattagtctagctagtggtcttttttttttttttttttcaaaaaaaaatagctcctggattcatggattttttgaagggtttctcatgtctctgtctccttcagttccactgtgatcttggttatttcttgtcttctgctagctttggggtttgtttgctcttggttctctagttcttttagttatgatgttagggtgttgatttaagatctttctagcttttcgatatggtcatttagtgttatatatttccctcttaacactgctttagctaaggaatcaattcaacaagaagagctaactgtcctaaatacatatgcacccaatacaggagcacccagattcataaaaccagttctaagagatctacaaagagacttagactgccacacaataatagtgggaaactttaataccccactgtcaatattaggccattgagacagaaaattaacaaggatattcaggacttgaactcagctctggatcaagtggacctgatagacatctacagagctttccacctaaaaacaacagattatacattcttcttggagccacgtggcacttactttaaaatcaatcacataattagaagtaaaacacttctcagcaaatggaagagaactgaaaacataacaaagagtctctcagaccatggctcaaattttccaaatattttttatccacaattggttgaattcacagatacagaacccatgaatacaggagccagctgtattttcttctccagcattttattatgaacatttggaaacatatagaaaactagaatgaattttatactgaatgcatatagacccagcacctaggttctatagtttacattttactatactggctattatcacatgtttatccctctccccaaccctgtggccatccatcaatccatgctattttagtagacttcaaagtaatttcagaagtcaacccattccctctcacatgtgttgttagatcatgtatatcattagctaaagtttatcactttttacccttctactttgggttacgtttatacgcatgatgtgcacaagttttgagttgcatccatgagttctgacatatagtaaacctttgccccctgcctctgtcaaggtataggacataccatcatcccaggaagttctctcttgccccttctcaggaaccccagctcagcataccccatacaactacttttctgatatcaccatagattagtttgtgcctgttctagaactttatgtgcatgaatcctacaatatgtgcttttggatgtaaggcttcatagcactctgtttttgagattcatccatgtatttgtgtgtaggcacattctggacacatacacatcctcatatacatacatgtagatacacatctatacatattgatgacatatacaccatgacagactttccaggtaaatgttaatttgttgcatgtatttctcttcaggaaatgccttgtagattttagtcatttttcttagatacttacttaggtaaacttttaaagagacttttgtgaaaaatggaaacttagagctttggttgaccacagaaagtaacttaacaagggccagttatccctaatatccctctcacttccttccaaagcagaaccatgaactggtctcaaaaatcttgtgctaggaagggaagggaagaaggaagggaggaggaggtgtccctagtccttgggtcttataaccattcacacctttcaggtgcagcactgcacattcagctatgacagtaagtgggaggagagaagctaagaaggtgggggaatggtctgatttgccgagtaaacagccatgttattctgtagtggaagctgctttcagtggccagcagcctcttcattacagacacagcatcagagagagaaaacaattccttcttcaagtacctttattgggaaatggatgcctggaatagatgtagggatacaaggccccctgcatgaacacgggagttgcatgtgtcagggtctttggaaggaatacgatcgtcattttttccaacaaacgctgtcccagcagaacacttcattggtgtggatcctcatttgtttctttgtgattcttttttatgtgttggttcctgacacacaagttgatttggggtggataacttgagatgcataaatgacatgtacagcagtggcacacccttggtgatcattaatatgttgctctgccatcaagtgccttgctaagttcttgttccccagaagcagattctaagacaaggatgtgggtgtgtatagtttatttaggagttgatcccaggaaacaacagtagaggatggggaagtgagaccaggaaggaaagatgaagctcaaaacaggtcaaaaaagaaagaaaaagaaaaaaaaatagaaggaactgaaaagaaaattctgcctaagttccttctgcaagaaaatagaagctttactcacaaagattccctttgccaggcagatctttttattttgcaaatcaatgaaatagttggtatcattcccagttaccactgtgagcaactcagtttaatctggctggggtcgccaggatacaatgtagaacacatacctcagagttctcccttcaaggggtgagggagctggggtatttatacaccacttccaccagtcatgggttgggggctgttcccagaagtgtcaatgccttggcacgtccagcctgcccctcacacaggaaaagcagtccccatggccgaagacagccttcaggtaaaagactgcaggtgctggcagttggaagttgggccattgtgggtgaggggaaaaaagccggcactgccagtcattgctaagttcccgcatccccccaactacatgatttcaatgttgttgagttggggtggaaagctcatcttgacccagaagaccacataatagttcttccccttcgtgtgtgtgtgtgtgtgtgtatgtgtgtgtgtgtgtgtgtgtgtgttttcatcttgctaagtcccggcactcaacctcagcccattatttttcactgcctcataacatgtgtttgtacaagtgctgactgctggcaagccatcctgccacagcagtgggctcagctgaatgggtgatctgaggaggcatttcagacctaggtctagaatgagaggaaaaacatttcttctttcctcattcatcttttactgcctccgtccatgtgtcagacttctggggactccagtgaagctcaaaacaggtcaaatttttttaaaaaagagagccaataagaaaattttgccaaaactccttgtacaagaaaatagaggctttactcacaagggttcccttcacctggactgatctttttattttgtaatacaaaagtaaaagagttatttctagaagtgttgctggggcctggggcctggaacttatgtaaacgcagagaggagactccatttgagtcctgagtagaagttaggagatatggtatcagcacagaagcacagtctgttctggaggctttgacctgtgtgttattttaggggcatacactggctttcctggcttcagagtcaaaagaaaatggaactatatccacaggcaactggttaatccctcactgggctctaccttgtgtgaaatggaatttgtatttcacacaaaatctttgaaagtgactcaatatgtttaaagccaggaacgctgtggccctggcattcaggtcttccatgatttcttatttccagagcctcccaaatgtggacacatccaactcagtgatgctccttaacccaaagccaggcacaatgagaggtaattcctgctctgggaagtgatgtgtggattcctcaaaggcgatggagtacagtttctaaaggaaaggttgtacctgtggtcttctaaaacatgctcacaagtgctttgatatttctcttacatgaagtgactctgattcccctttccttgaatatggctggcctctgtgagtcccctgtaactgacagattatagcagaagtcatttgccttcagaagctgggtcataaaaacaatacagcttccacccagctctctccctttgaacctggctgccatgttgggaggaagcccaggcatcatggatgaccccagctgaggtcctagctgacaggcagcatcaacaaccagaggtgtgggtgaagacacttcctaggtgaccccatcctcagtcaccacctgactgcaacctcttaagaatttctgagtgagaactacctaactgaggctagtcacacacagaaccaggagacgtaatgacaagaaaagaatgctgctgttttgtgctgccagtgtggtctggtttgttatgcagccacggtgactgatacacacatatgctcattgtcacacggctaaagaacttccggggctcataaaggatctccactgtccatcactcacttccttccttcggtgcgatgactgactggcttcttgactctcaggaaatcagtgtctggggagaagagacaaggaggggtgtctctctctcattcctggagtcttcagcttgctgccaagttttgtgacctagaggcaggcaggaggtttccagctgtttcgccctcaacaggttggagattgagggactgttcactgtctggctgcgagaagtgggggtggcagctgctgcctttcttcctccagatgagatcacagtggtggtggcagctgccgggaacagttctccatgttgtccccacgtgctgtgcctctggccaacatagcacacctaacttgcttttaggttgtgacctccacaccgagcctctgaccttaggaagtagttgcagggtgcatggcaattggagccagtgtcttttccaatgcttcagttccgtggaaggcaggtccctctatgcccaatcacaggcctttcctctcactttctcccctgcacctctccctgttcagcttaggattggatctgctatttcttcatgggctcttggggagaaatgtgaaaatgcatgtgaaaggactttgaaaatatccaaagatgttgcaaaaatggaagctactgttaagggattagtgagcaattagtgggacaggctggagcaggacacctatccagctgtttcagctcctcttaagaccgtaagttagtcataaactctcaacactcagagactttaaaaaagcatgcagcccagaaatcgatagaatgcttggatttcctttgtagcatcaccacagagtgctcttctaccacatccttggttatcctcagtgatggggagctcacttaccacctccttttagaggtcttttattccatgggcaactgggattattaacattgtcttccttgtggcaagccaaactcattttcctttgagttatcttgaattctataaagtaagtcgtatttcttttcctcatggcatacttttgaggtcagctattaagttcttccttgttcaggcttctctctcttcagttttttagtcgcccccttatgtgacatggtttgatgacccccctcagcatctcccttctagttaccttctgggccaaatgcttatctcctcttcagctcttaaaaatcagcctcctgttattatgtttgaacagcttgtgaaaagattggacctcactccgcccatgtttagctgttgaatataattatttcagatgcaaacccagcattcctaaactagcacttaaagccctgcattctctcaagggacaaagtaaaggaaccgggcatttgttgagtgcctccttggagccagggctaggctaagggctctagctacagaatcaccttaattctagtaacatgcccatgagtcaggcattccaggaacacccagaaagggtaggacatacaggagttaaatctcagctacacctaagtgctccttctaaccaccttcctaaactgaacttcagggaagactctcaagctggtggactatatttccataaggagtggtctttgccctacatgtgctaagccctgtgtgggcaggggctggggctgttttgctcactagtagatcgccaagctgtagagagtacttgatactatctataatggtaatggcattaaatcttaggtgaattaatgaacaattgattgaatgaatccatgtaacttctctgtgacaagtttttagtattttatcttgaaacaacaaaaattaatacagaaaactgtaaaggaaaatattacaaactccagtgtatttatttgccaaattaataaatgctaacatttttatatttgcttctaatctttttccatttataagaagtaaaacattgcacatcaagttgacatcctttttatttgccttgtcaggtcttctactccagaagcaaccatcatctttatttggggagtgtctggcctgtgtttaatatttttgcctcatatataagtatgcataagcactaaataattgtatatgttttcaaatttaagcaaatgttgttttactatattaatatttgtgatgttcattccactcatgtatttttgagatctatgtgtatactctacttcatttaactgctgtctagtattccaccttatcacttgattgccatttgcttattcatcccccagtaatcaatatgtgggttgttttcagttccctgttgtgggtagttaatattatcgtcaccctaagttttcaagcaaggaaacttagagtcatcagttaaatgacccatttaaggtgtcagttttaataggttgtggaacgtgataatgaacttagtggcctttgtttttttttttaacttttattttagtttcagtggtgcatgtgtgagtttgttacataagtaaactgcatgtcgtgggggttttgtgtatagattatttcatcacccaggtaataagcatagtacccaataggtagtttttctgattcttcctctcctcccactctccacctcaagtaggccccagtgtctgttgttccttttagtatccgtgtgttctcattgtgtaactctcactcataagtgagaatatgcagtatttggttttctgtccctgtgttagtttgctttggataatggcctccacctccatccatgttgctgcaaaggacatgctctcgttcttttcttacggctgcatggtattccatagtgtatatgtgccacattttctttaaccagtctaccgttgatgggcatttaggttgattccatgtccttgctattgtgaatagtgctgcaatgaacatatgcgtgcctgtatctttatggtagaatgatttatgttcctttgggtgtatacccaataatgggatcgctggatcaaatggtatttctgttaatttctttgaggaatcaccatactactttccaccaatggtctttctcactgtatcagttgtctgccttcaggaaagggagtgaattgaaggaaatgttggactgctttatcttctaaaactccagaaaggaaaatgatcatttttagaggagaccgtaaatgttctatgcaaaaggaagtcacctcgtgtgttccaaggatgagaaaaaactcatgcatgataggaggttatccctgaggctaagtcttgccttcctatctcccatttttgtggtcaccattaggcatgaacagcgttgttgccaagtcaccctactgtgtggctgctgactattcacccatggcttctgagcaatagacaggtcaagtattacaaccaccttgaggttggcccgtgtttcacaaaaaccaggaggccatgggtgaccttatctcctagcttcgaggatccaaaactaacaaatccctggaggatgcagccatttctgtctttggttagcatccttctttaatttcaacggaatataatgtccccgtagagcaagtttaaacaagttaacataaaaagaccgtgatcatatcttccctagcttctctttaatacataggctttgaataacattaatcaagttttacaaatttaccaaaagatgttctaatttctgctacaataaaaaccttattttcccttttctagggatgggatggcatcatggtctttaagccacctggctctgttccttgctattgagaggctcaggggcaatttgcgtaacttctcgtagtttcctcatctttcaaagcagatgttgttgatacctgcctcattgccggaacaaatttaccagaaaacctgagcctgggagtccctacttgcaatggcccttccaagacgttccatctcatttcctattcgttaatttggtaggcttttttaataaagagggtcccctgagttgataagctcctctccctaagccctggctccacctccttgtacattgggttgttgtaaggaagttgcacccctcgctgtgcctgtggcgtcattcatgcccagtaattgttagctgtggttaggttaattttttccccttcttaaaagaacatgaatatgaaaatttctcaactaaaagccaatggtaaaacattttacaagggggaaaaaagcatgcaagaaaatgctgattaccaacaaaagcagagaaaaaattgttcctagaaaagatgaaattgtacaagagaggaaaggagtcatgaaaagtctattcttgagcatcctgaatgcctggcttcttaaataatctacaccctgaaaacttgaacgtgactattttggccctgtctgaactttaagacctgatgagttattttttttctttcctttttgaatgcaaagtaacagttgtgttctaaatttaacttttcctgttggctgcttggactttttgctcacatcaggcccaagtgggatatgagcggctccccatgaaggatcaactctgccatgggctgtcacatccctggggaaaaatggtctcaagggccctgagggatgagtggcttttggatgtgtccattctttctgtgcagtgatattttttccccagagttagtttccttgacatcatgttcctcagcctccccaggagtccccagcattgcctctttcatgaggaaatgtgggaggatggttgcttcctgtgtaattctgaaagccatttatgggatcttcttgcagtttctcacctctttgaatgccttcttagcactcactatgccatggagacccagactatttgtaattgaggcacccgaaccaccaggagggtaagggatttggccaaaggtgcatcacatgctaagagtgaatgctacgccctgacggagggtagaggtggggtgctgcttctgcttggacctccattcttgccttgcttgagtgtttatacttaggatgtttacaccaggtatgacttgtggggttaagaatgatctcatgacacatagaccaatggaacaggatagagaacccagaaataaagccacatctggtcttcaaaaaagtcaacattaacaagcaatggggaaaggactccttacgcgataaacggtgctgggataagtggccagccacatgcagaagaatgaaactagaccccattctttcaccatatacaaaaattaaccaagacctcaaacaataaaaatcctagaagaaaacctaggaaatatcattctgaacattgacgttggcaaagaatttatgactaagtccttaaaagcagtggcaacaaaaacaaaaattgacaagtgagatctaattaaactaaagagcttctgcatagcaaaataaactatcaacagagtaaaaagacaacctacagaatgggagaaaatatttgcaaactatgcatctgacagaagtctaatgtctagaatctataaggaacttaattcaataagcacaaaacaaataacccattaaaaatgggtaaaggacataaacggacatttctcaaaagaagacatacgtgtggccaacaaatatatgaaaaagtgttcaacatcactaatgattagagaaatgcaaatcaaagcaacaagaagatatcatctcacatcagtcagaatggctattaataaaaagacagaaaagaatagatgttggcaaagttgtagagaaaacagaatgcttatatactgtttgtggaaatgtaaattacatcagccactgtagaaagtaatttggagatttctcaaagaacttaatacagaactaccattcaatccagcaatctcattactgggtatatagtcaaaagacataggtactcatatgttcattgcagcactattcacagtagtaaagacatgaaatcaacctaggtgtccatcaatggtggactggataaagaaattgtgatacatatataccatggaatattacacaggcataaaaaagaatgaaattatgttctttgcagcaatatgaatggagctgaaggccatgatcctaagtgaattatcgcaagaacagaaaaccaaatgctacatgttctcacttgtaagtgggagctaaacattgggtacacatggacataaagatgggaacaatagacactgcagactactagagggggaaagtagggagggggtgagggatgaaaaactgcctaatcagttactctattcactacctgggtgacagtatcattcatacaccaaaccttagcaacacacaatttacccatgcaataaacctgcacatgtacccgcagagtctaaaacaaaagattaaaaaacaaaaacaaacaaacaaacaaacaaacaaaaacctctcacgtgacactgcatagcttttctgtcagtagaggtttacgtttcactgacctttcctctgagtgagatctgggtctcccaaggacttgaggtcttctgagccttctgaaggctctggctgttctcttccctggtgaggatattggttggagtggggtcagcattctaggtgaaactgaaacagcaatgaactgggaatctgcagactaaattttggccattgcgttttcattgatcagttggatgaaaacatccatcctctcatctcaaaatggggatatgaactacattactgtgttatcatgaagagtaaatgagataatatttgcaatcatgcctaatatttatagtaccgggtgtgtgatcaatgctcaatcaatggtcacccccctttgaatccttggattttgtatatcaaatgcacagactgactagatgatctttaaggctcctactagcaccaaaatggaatgattttatctgttaagagtgatcttttaaaatctgtctttatgtagatgaaaagcttcatgtagatgagaaaagataaaacgtttttaaaaagtgtctttcatcctcagcaaagtaacacaggaacagaaaaccaaacactgcatgttctcagtcataagtgggagttgaacaatgagaacacatggacacagggagaggaacatcacacaccggggcctgttggggggtgggtggaaaggggagggagaacattaggacaaatacctaatgcatgtggggcttaaaacctagatgatgggttgatgggtgcagcaaaccatcatggcacatgtgcacctaggtaacaaacctgcatgttcagcacgtgtatcccagaacttcaagtaaaataaaaataaaaataaagaaaagttttggcaaccaaaaaaaagtgtcttgtttgtaaagccctttacacaggaatacacatggcagggaaactgaggagtccaccttgggaccaactctgcatctgtggtgacccagcagacatcggtttgcttaagctaactcagcacaggaggatttacattttccttgtgcctcatatttatggaaacaaagaattttttaaagtgaaatgttatctttattaaccatacttgacctcatgtctacatgacacatgacacagaagtcccctccaccagaacacaaagagggcccttagaaaatggatgtgggagagtgaaccaggtaagtctttattcccttcaacctggccattgtttaaattaaggaggtatcatatttatcatattttaattcagggctatgaggttttctaacggactcataaagcaatgctttgaaaggaaaaggtctctagtggtatattgaccaactttgatgtcaccaacttcttgacttttagtttcttcactctacagctgtaaagattgctcaaatggaccttgcaaaaggaaagcttctagctagacagggagtggcttcattctgaaattgcagaagactgaagtgactttcattttgttatgcgttttgtttggagggtgcagaaattaaacctgtgagtctgcctccgcagtcctcaggccaccagctgaggggaggggacatttgtgatgtcttctgaaagctggtgttggagagctgaatcatgccaagtctcccattcatttactgtgaatttgtctgagggcttatcaggatagattctatacttgatgcacttcgcaaacctttattgagcgattttttattaaagtatctgaaatcagtcatgtcatttgcaactcggaatggagaaatactaaacggggttgcaggaggggctttatttcatcgttaaggagcccgtattatgacttaagtacctcatttatctggcatcgttgggatatcgtttctgcctaagtggctgctgctgagggtgcagttccctccacatctaggaactcgacaaatgtctgcagaatgtggttgaatgaactaaatgaaacatctctgcaaacgccaggccattttgaaaagtgataagcatttgattgatatctttctaagtaaatttaatacgttcttgtctgtgagtcacagtgcacggaatgtggattggacattctagtgataaattgaagccatggattcgtggaggacatatgttattttaccgtcttgtaattcagaccagggcctccttttttgttgtcactgtgtccactgtcacttccactacttcctaggtttgtctacctttaaaactttcacaccctcagatcttctaaagtttcatcccgacagcagatctatggttagaacataaactttagtgtcaggcagatcagacttgaaatccagttcctctcattttcttgctgcagaacttgatcagctttcctaacttcactgaatatgggcttcctcatctatcagataaaggatctgtgcttgacctgatgacattaccagttcattaaattagctaatgtatattaagggccaaaccaggtggttagcatgttctcttgccttctgctactcagtgtggtccagggaccagcctggaagtgtcaacacctcttggaagcttgttagaaatgtagaatctcatactccacccaaacctaccagacctatggaatcagaatctgcatattaactagctccccaggtggtacctatgcacactgaattttggaaaacgctggcctagagcttctattttttctcctctttgggagggataacaagatgttaactttagtttgtcaaagcttcagttttctggaaggatgaggggttctaagcatcatgagaagtggccttcaaaaagagagttggaactttttgcaagcttcttctctgtgtggcagcttaatttgagatggccctttattgttcatttcttacccatccacataccaacatagaatcatcatttgggggaatgtgaagacaagggactcctccttgcaccctgggagagctgggcttccagtctgtgctccaagctttcacgccccaggagtgactctgggtcattgggacaggtcagggcggcaaagcatcacactcttcctgctatcagtgtccgaccagcctgagtccccatcctgcacagtgaaaagagtccagcaggcacaatgggcctgagcagagccggacttgacattggaggcagccctgggagatggtgcctggtgtcttcgtggagttcattccatcttctggctacttcacctaggtgtcatgacatctaataactgatttttcattttcttgaaccgatagacccttgctttcacattaccccttctaacatgtttctgccacattctaaacccttgctactcagagtgtggcctcaggcccagaggcatcagcaagactgagagcttattggccacacagaagctcagcccccaccaggaaaatgcactgagtctgaccatgaatttcaaaagttcccaggtggtcatgtgcacagaagacttggacaagtgctgagctagtgtatgttcagtaaatattaattttctcttccatttttaaacctggtgtatgaaataaaaatcaataaggctctgaatgagagcttgagaaatgagaagctcaatatcagggcaggaattccatgaggactgtctattctctggtccaggccagttctctggaaggtccgggttgcttcaggactgacctgcggctacctgggaaggaaacttactgctccagccactgttcttcctcatagatgtctgcagcctatgaagccttgctgagacagtcattatctgtgctgcagtcattcagggcagcaagcatataaacagagcttgatgctgccttcagcttccagttacataacctcactttggagtcatactttccagatgttgtgtatggacatgctcccttcttgcactacctgtttctttagccacattcaacttttgggggaaaggtctaaagacaagctccaaggacagccagcatgctttaaatctgaaataaagccttttttgagcttataatcatgtttatttgctttgctggagtctttctgaaagcttttcatttcttttttattccccctctatgtaatcttccttcgttcctttcttccttccttgcttccatccctccttccctttccttccctttccttccttccttcttgccttcccttccttttttccttccttgccttcccttcattttttccttcctttcttcctttagtggagaagcacagtttggggtcactggagcttgggttttggttactcatatgtgtgtagagacttgagttcagatttgcgaggaatttgggcatgaacctaaacctcatgttcaaaggctcaaggcttcaagagaaccccaggcttgcagtcagcaacttttggccagcagggcccgcggatgggttctctgtatgtggtggatcattccagggccccacacaggaaatcaggatgaggtcactcaacagccccatgctccttcagctttcatgctggtccaggcattctgctaatggtgggaaggtttggagaaagaagagatacagtcccagccctcagggatcacatgcggaaggtagtggggagaggaatccagctacatccactcagagtgatcaatgctgtactacaggtgtgcacgttggcccccacagagggccaggatggggcctcccatcctgggaggtgtggggtaaaggaaggcttccaggaggaggcagtgtttgagtcaacaagtgtccccaaaggaaaacagttagatcagatttcaccagggaggatgatggtactcatttgaggaggtggaagccatgaagtcaagatagcctgttagtaacaacagtatgcagctctcttttttcccctatggccagcagggaattcatctgccacacttactttccacactcattaaatacatcttcccaaagggtggcctggaggaaatagggatgcagtctcctgatgggatcgaggcccactgagaaacatggctgccggtgctgtgtgtgtagcatgagggtttccttcccatgcgcccttcctctttcctctgttgtgggtcatgaataactatgaatccattcgctgctcttgttctacttcatgtttcaaacacaggaaatgagcctctaatataagaacaataaactcagaggtagatcactgcccggatggaaaattgccatgtgaaccaaaatgacacttgattagtttgttaaggtgaaaacatttttctaagtggcagtgggtgtccctcagtgagatcccagcattggaagagttcttcaggggtgtaagacacaaagttccattttcccttcagtgaagggcttcattcttgcatgtagggaaagtataggtgtgccagacttcatcggtgggtagcccaaggcgcaggggacagtgttccagggaactggtcaaagctctaggaatttggaagttagaacagtataggtatatatagcttttatatttatatagttgattttttaaaacttgaagaatcatttaagaatgcatacatatcctagagaacccaaacagtactgaactatacagggtaaaaagttaaaatcattctccacttacctcctccagccactctgcacaagggtaactgaccattgtgaacaaggaggcccagaaggtgggattcttcatgatctcttcctattcattcacaagtatatatataggttattaatacaccagtgagatacactttacactttattttgggacttgctaaactgctgccttgatgttttattgttttgttttgttgccctcacaccttttgtctggactttatgttgacaagtgtgatggagaagggccttggggttgtgagttttatcccaggacttaaatggaaccagagagttcccatgtgcttctgaggttgctcaaagctcagagttccattggcctggtgtgttttatgtggtggcagcctgggtattggtagcaatggtgatgctggcacagcctggccacttgggtttccctggccattgtattgtaaagttcccatttactttgtagcagtgtcaggaccaacaagatgagggaaaacagaaatgttctccagggttttcaagtattcttccttttctcttgcttttttttttttttttttttttttttgacatggagtcttgttctgtcacccaggcttgagtgcaatggcaggatctcagctcactgcaaactctgcttcccaggttcaagcgattcttccccctcagactcccgagtagctgggattataggcacccgccagcatgcctggctaattttgtatttttatggagacagcatttcaccatgttggccaggctggtcttgaactcttgacctcaggtgatccgcctgcctcagcctcccaaagtgctgggattacaggcatgagccaccacacacagcctctcttgtttttttatgacctcttctttctggccaagggagacgaaatgaagcatgttgtttcggagctgctcctccacccagagatggaattaaatcagagccttccaaggaaaagcagtggggtgtctggttcctcccctgtttgctctgggctctgtacttgagtggcactgagaagggccagggaacctgagctaggctggaacccagcctgttctgggtcagtggcccatttcagctctgaggtctgaacttgcctctcctgccactgctaggtctttcttttcttagttgacttaacaagtcagattttgagatttaactaagaatccgaggcattaaacctagctcagctacagtaatctggctgctgattccatgtggacatgtaacagctcctgctttcagagcaggtcctggggatcacggtgatatggggcaagtttctcttgtgcttgaaccttttcttctgcccttttcaaactagtaacagggaggtaccatactgacaagtttaatccctctggggctttagaaacttgttttgctgctccacttcaaccccatgaggagatgatacatcttaaaggatgggcagagggagagggcgatgccagatacatgagttgaactatagaacttcaggtcttgaggtaaggaaaggaaaattcatgctgtaagcatcccctgatgaaattcacagaccggtcactgtggtcatttatccagctcatgtttacagaacccaggactgttgataaacaacaaaagccttcacctttgaaaattttctgtccccaactttgtctgtggttttgctgtaaggtcccaggcctgcagacaggtgttcttccaagggccaatatttttttaggaaggttggagtaaagatgcactgatacctagttctattccaaatcctctttttttgtttttatttatttattttattttattttattttattttattttattttattttattttatttttgagacagggtctcagtccaccacccaggctggagtgcagtggcgcaatctcggctcactgcaaccttgacttcccctggctcaagtgatcctcccacctcagcctcctgagtagctggggctacaggcatgcaccaccatacctggctaatttttgtattttttatagagatggggtttcaccatgttacctaggctgttctcatactctcgggctctagcaatctgcccacctcagcctcccaaagttctgggattacaggcgtgagctactgcgccctgcctttaaatcttctttactggaattgtagacacttaagcattctcattccttgtctgcaggatgaagggagttgctgcggaagcttctctgccatcaggcagcctgtaactcctgccatgccagcacgcttcccatccgtactcacagtcttccggaaggaatgtcagcaaagcttgtcataacacaccttagtggttaccaggccttggcctgtcggtgtgtctggacatgagttaccgactgtgggcaggaagtctgacgtttcagatgtgtgatttacacatggtgtctgcaatgcacagaattgcagtatcaccctgtcatctgacatcattaactgcatgttgtggcatttggtcaaaggccacacataaaagtgctgaagaagaaatttgctttgattttctaggtggtagggccagtgtgctggcaatcaggtcacttgcttctgaggcacccgcgttctgtcccatctgctctgtttctgctatttttgcaaagaaagggtccttggcattactgtgctcagattcgcctatccttgcacccacacctgtctctatagttcacacagggtaggttggtttcctctgtgctgggcagacctgatttccctcttctccatcaaactaggcatgttttaaatgggaaatggaaaggaggctgcggcagcagcctggcagtggccccagggtaggttttccagaatatgatgctgttaggacgagatcactggggctggggtgccagagaccccattcaggtgcaaagaagcaagtgtatggttgagggattttctatccagcaccaaataggaatggaatggagtgttctggaaagaggcaagatttgtgctgaaatcctggggtcatggtcttagaaagtcttagaaagctaagtgggttatatggctgggggcagatccctgaacctccctgggctatggattctttctacaaagtgctgatgtccctccctcctggttgtggtcatagaaattacatggaagcgtgcactgctgtgctcaggtcatgatcaagaacacaggtgctggtgactttcatgatctgttgatgtggatccagtggctcttctggtaggagggtcatcaccctgctggaagattacagcactgtaaccagagttcacagttcttttgttcactcgtgtacataaacgtaggtgctcctcaatttaaaatgggattatgtgccagtaagcctgtccacaactgaaaatatcataagttgaaaatgcatttaatacatctaacctagcaagcatcgtcacttagcctagcctaccttagacatgctcagaacacttacattagcttacagttagccagaatcatctaacacaaagctttttattacaaagtgttgaacgtctcatagatctgttgagtacaatgtactgcagaatgcactggtaatagcatggctgggggcggcagctcaccgcagctgcccagcatcaccaaagcctattgaaccacatattgctagctcaggaaaagatcaaaatttaaaatctgaagtacactttctactgaatgtgcatcactttctaccgtcacaaagtggagaaatcccaagatgaaccatcaaaaatctgggaccacctgtactaaggaagctctagttaagtgggggtttgagcaaagacaaggctgcacagttcctacctcttggtgcttctgtagagctggagtgagaagggtgaaataaaggcttaccagggtttacataaaaggccaaggaaggcagcgtgtcctgcagccactgggtcagggtgtaggctgaaaaccatcagggtttgctccacctccgggggagcaagtacgatggtccctttgacaggacagggtttccctgtttaatctgagctatggctcataaatcagtcaaataaaaaaatccaatcttgaaaatgtctagcattttcaaaaattctgggattcagtgaagacaatgggagccataaatcagccagacaccaagtcgtgccgactccccctgggcaggagcacagagtccaggccaggttggccctaggggctggggagaggtcacctgacctgaaatggactttgctgaggagacaatgagaatgatctcaaggtctttgctgaggaggcagacttctttaagtgttcccaattaactctctttgcaaaatttttaaaaatagaatctcttgatttctttttttaaaaatttcctacttttattttaagttcaggggtacatgtgcaggatgtgcaggtttgtgacataggtaaatgtgtgccattgtggtttgctgcaaagatcatcccatcacccaagtattaagcccaacatccattagctattcttcctggcgctctccctcctcccacccctctgacaaaaggccatacacctacaaccatctgacctttgacaaacctgacaaaaacaagcaatggggaaaggattccctatttaataaatggtgctgagagaactggctagctgtatacagaaaattaaaaactggactccttccttacaccatgtacaaaaatcaattccagatggattaaaaacttaaatgcaaaacccaaaactataaaaaccctagaagaaaacccaggcagtaccatttaggacataggcatgggcaaagatttcatgacaaaaatgccaaaagcaattgcaaggaaagcaaaaattgagtctccttgatttctaagtgagctaccggtgactgggcagacacatgcattcgaggtcttagaatcatctcatttctgtttctcctcaattgccaagtgttactttcatttccactctgctctgcaagatgactcccctgtgacctgctgcattcacagaaaagaggcaaaaggaaaaagatcacttcaggacaaagcagccacagccaggcccatgggccatgccttctcaggccacccctcactcctgtgaccccaaagggtaaaacagcttcccatcccccgccccaggacacctgtttagaaagcttatgaggaagatctgttcctcctttgagttgctgtagacaggtacactcatctttggggagggttctcttttgttctccccttcaccagctcaccccttcttgccagggaaatagaattgcttgtctgggtggataagcatgccttgtgtttacaggacacctctctcctgaggagtgtaagccttttacataaaggtgccctcgggcatcacagctggtatagtaatagctgcattctctgggtctttcaggaagcagacaccactgtgcctgcccatggttccttgctcttaccacattggtgcacactggccacattctgcctgctcacacctgcattcctttgcccaaaggctttctttggaggccagagtccacactgctttgtgcatggcaggctggaaatgtcagagaattaacgacctctggagcagccctcaaccaatggctgatgggaggtggtgtacaaataccccagctccctcatccctacagggggctgactctgaggcacgagtctgcactgtctcctagagttgcccagtaggattatgctccacttgcccacagccataacctgctggataacacaagctttatgggcagcctttccccctctctctattccttcttcctctatcttcacctcccaaatacattactctcagtgtctgttcagtgggattgaaagccaagacatttacttgcatccttttgtaggtgggcgatggtagacctagggaagaagtaattagccatgatgaggaggctgagagacaagacccaagaaagaccagagccagggggaaacactggcatctctgcctggggaggctgtgctacctcctcatccctagtactgatgttcacgactcttccagaaaagccgagttagctctcctcatgctgatttcctgagacttagctgctcttattaccagatatgaaatcaagagtgggagacaccacatgtactcctttgccacaaagaggcccccttgcaatctccagtcctagtctcttgcttgtcccacaggtagaagggtaggtgtggggagggaatactgctgtgcacctgagacacttagttttagtgggaaaagacagcacaaggacacgtgggatgctcttcagggctggaagagaggctgatgggggtggggcagtcatgtccccagaactgctgtcctgtcacttgcagggttacagcctgcctgcgaggggagataaatattctgtcttgttccatgctgaatggctgcctcggtctaaatgatgcttttttttctccttttgagatagcatctttacttccacacagttcttccccttgttaccagcattttccagacctcagaagaaagttcgagaaggatcctggtcttggtgatgtgagagctcctttgtgccatgttttagagcctctgcttctttttgcctgccagtgagttcactgcactgctgttctttgcctcttcctgctctaaactttacaattggtttgccagggtgaggctctgtttcctttagggaagtagaaatagaagatcaaagtgaatctaaaggaaccatggactctactgtcccatgagcaggacactggtaggggctggctgggcttaatttttgctccgtaaatatgcatgtgtgtttattacttaaaaagtgtatctcaagtaagcattttccagcagaactgccttatacataaatcagtgcctcagacctattgcgattcataggctctgcacctgaaactcagatgtggctcaaatgcagtggtgtgatacctaccacagcaactcgccgctgctcactcttcctcactcacagtcagccctgcctcatggcaagctcctcttgggtccttggtggatgcattgaactgatacttctgcgggtgtggcttcaagacatgctagagatgcagaaattaataaaatagactccttgccctggaagcaccagagtctaggaggcagagtgctgtttaaaatactcaacagtgacagagtacctggccctaggttggatgcagtgagattttagctcttggagttaatgggccatgggggaggcggtgttgaggggtcctggtggaggaggcagcaggaaagcacaggagtgggcactggaggcatttggagggcagttatttaccagctggtacagagcatcttggtattttaacagctggtacacctgtacatgtgtaccccagctggcctgtgcccatttgaccatggggtcatgggacgcatacctaaggaatcagtgcactgggtttgtcaaagggtggtggctccctgccaagcatggggaggtcgcagagcttcctcctaaaactcctagggcagctcttctagacctgctctacttctcagcagctgcagcatggatggggaaagctggatccatacagcttgctcacctctaattacgtttgcttgaatctgttggcaggtcaaggctgtgcctggagcccagtgtgtttaaataaaagctgagctgaagacgcgccaatgtcccttgtcctgctctgtagctgttttgtggctttgttttctgtcgggcgccgacggtccaggctttgtcatttggagaagtggtgtgcatgtgtttttgtttcactcaaaagatggtaatttcctaacatcataaaggtcgagttatgaaattaacatgaggggatgcctgagtggaacttaaaagattatttccacctcatttaagagattgatgctgaattgctattctggagctcttgggtttgggcatctgctcatttttctgggacagatgttgtccctagctttgttcatgggatggtcattctgcttggagtgtgctgacctcatggacacagttcatgtctggctttatgtccacatcctatgcaggggctttatcacatctgcttggtctctctctctctgttatgcattatggacacacacatgcatgttacattacgttacacatattttattactattcagttgtcgctcggtatcttcaggggatttgttccaggacccctcacagttgccaaaatccgagggtgggtgcccaaatccctgatatgatcctcccatatgctttaagtcatctccagattaattgtaatacctattgcaatgtaaatgctatgtaagtagttgttttactgtattgtttagggaataattacgagaaaacagtctgtacatgttcagtacagatgcaatttttaagatattttcaatctgaagttggttgactctgtggatgtggaattcatgaatgtagaagactgactgtatacagaatgtgtgtacatgtacacacacatatatatgtattgaatatgtggatatatatgtatacatacatacatatgcatgtattgtgtctatatgcagttagtcctctgtatccacggtgaatttggaatccacagatatagagggctcactgtgtgtgtgtatatatatatgtatttatatatataatttacttttttgtgtgaaagcgtttgacagtaagctgcagaaagacatcatgactctttggctctaaatacttcagcctgatctagaaacaaagccattatattcctgctcataaccacagtgtcattatcacactcaagacattggagcagtaaccttaagaagtttaaaaacaatacaagtaaggtttttgtcacattaagcacttgagtgatggagcgaacacagcgattactcattatggactaagcgtttcccaagtccctggcatgggctgagcactgcacttagcactaaggaggcaacaggcagaggaaaaacatgaatcggtgaagacagtgaaaacatgtgaaggaaaggaaaggaaacttagagaagctcatgctacgtaacttcaatcttggaaaatcttagaacattaaaagccacttctatctctagactgttagatcatccagaaatcaatacaaatcatcttaagattatcttatgtcttaggtctctaagacacttgttacatttaaatgggcttaaaataattaaaaccatatgttaagggagagtggatagaagatgctgtaaagttttgtatagttaccttccaagacgttgaataaatacagttccattttctggtcaaattaatgtcaataatgtctaatatattcctatattcttatttctccaaatcatctccaaaagtcttctatagttttattttttaaatctagaatctagccaaggttcccacattgcattttagaaaatctcctgccattttctttttcttccagccactgacatttggatgcatccaggcctgttgacttgcagaatgccccatgctctgaacttgtctgattaacggattacctctctctgattagatgcaggatgaacatctttgacatcaggggtgcggtgcccttcccagtgcatcacttcaggagccacacgatgtcaatatctctcatatttgttaactctgactgcttggttatgaagtgtccaccaggttgatgctttgtctatgtaaggtgctcctgcttctcaacaacctttccctctgtggctttagtatccttggatcatcctctcctagatctttattatagcagggtgtgcaaaatggtgattttcctattcaatcatttcttctacgttagctggtattcctctctaaatatacccctccccttttagtatcattatggattcatggattgagccttctttccttccttccttcccttccttccttccttccttccttccttccttccttccttccttccttccttccttctttccttacatccgtttttaatccattaccttcattgttctttttggttttcaaattgtcccaattttggacataagagcccatttaagctgacatggtcctaacagaatttccaaactcacctttttctttcctgtgtgggtatttttgactttcaaaggcttgggatttccctctagcctgcatctacttgttctgtgaaatttagttaggttataacagtctatcttgtaattatcgagcactggtcttaaacacatagtgctccctcatgttcactctgcacacacaggagatgcaatttgcacaccagaccttggctcacagccacaagctcctggaatgcagcaaacccagggcctgtggttaagcccttctctgagcttgtaaggatgaactcttcttatcagctggagctggcaaaaagacggtagacataaagacagtggggctggaaggaacccattttggatgaagaaattttcctttaagaagaaatataggccgggcgcggtggctcacgcctgtaattccagcactttgggaggccgaggcgggcggatcacgaggtcaggagatcgagaccatcctggctaacacggtgaaaccccgtctctactaaaaatacaaaaaattagccgggcgtggtagcgggcgcctgtagtcccagctactcgggaggctgaggcaggagaatggcgtgaacccgggaggcggaggttgcagtgagccgagatcgcgccactgcactccagcctgggcgacagagcgagactccgtctcaaaaaaaaaaaaaaaaaaaaagaagaagaaatataaccttctttattcttcaagctattagagcattgagaatagagctttgtaattataagcagaatgacctggagcaaaatttatgcatggactagcggaggttagagtgtgagcaggtccatgccacataagcttttggatgacccagcctgaaaatgttccagatttatcctaggacacacaggtttcaactatagtgggtgtttctggcaaggttgatcatttcttttatatttaagatattttaaaatataagggtacctcaagaaccaatggaataaggccttgtggagcaaacaggactagaccttcatatccagacagctgtccccccagcacacatccctagcctgctgcagggaagtcctcactgtcagttttccccctgtgaaccccacatccagtgggttcaccaggcagttaatatgggaggccaagacctaagggggactttagctactatttatacattttatggaaccttctatcagagaagtgctggaagccacactgacccatgaggaaaagtgaaagctggaacttcatttgctgagatggcagaagaataagctttagctggaaaattgttcctttccattactcagtttaaaaaagtttttttgatagctctgcaaaccatttaattgatgttattatcatcagcagcatcattagcatttcaaaaaagtctgctaaattaagaatatttgctttctagtctgtcatagataagaagaatacctgccttgcaaggtcgttgattggtacatgagatcacacacagggagctctcatcacagtgcccggcgcaggatgagagcccagaaaacgctgctggtgatgactgaacaagcttggttgctgccatgatgtggcctaggaacacttccaaatgaaaaatgctcttcccaagccattaaataattcttcctgtttcagtcatgtgaaatctcctggctgttcactgtggcggatgagaagtcacaagtggatgttggggggcaagtttgactgtcccttcccctcattagagaagggaaaattagccagaatcctgccttccttggtgctaaaacttcactggattggtttgcaaccatttttgatttgaatatttttaactgcagtgagattgggttacacagatactatcgtgtctaaattatacatcctgtggcatttatcacaagacattttcactgctctaacagatgagtgggaagttctgcttttaagaacgtatctttctcaggttggcactaagtggtgtcacagtcccatgtcccccagggttgtcctggccttggggttcactgtgctctttggcctcagccacgcttctcactgcttcttctgactttgcgccatgagggtttgacatttttacccatccgtataatcaaaggcaatcaagttgttgcttcattaatgacgtttccttaggctatgtctatagaataccaattatatggctggaaattgggctaagtcaattatcttatttttcccaaagagtttaacacaatctgagatttggattaatattgtgacacatgccgtcctgagaaatgtctcagacttttgttcaacgagttaatcctcctgctatcttcacttttcttttctttttttctctcaaattttattacaaaatattcactaacaatacaaaaatccaatgtcttcacttttcaatcgttaccctggcagttgacattcaagaaccacagctctgctgttatgacagcttggaaggtgaatggacggtagatggtagagcctttttttttttttttaatgacactatctcattcttactcatgtttgtcattctcttgcactcctaaaataccttaggtagcttttcggtcagtggggtcacctccttaggagagagaaggaacccaggctggctacagtggctcacgcctataaccccaatactttgggaggctgagacaaggggatcacttgaggccagaagttccagcctgggaaacatggtgagaccttgtctgcactacaaaataataataataataataatattaataataattacctgggtatggtggtgcatccctgtagtcccagctactggtggggctgaggcaggaggatcccttgagcccaggagttcaaggctgcaatgtgctgtaatggcatcactgcactccagcctgggtgacgaccgtgagaccctgcctcaaaaaaataaacaaaccaacaagaaagggaatccagaccacagccttgggtgctgcattggatgaatagtccctcctgttctcagaagcgatggtggtttcttccagtgccctgctccttcctgaccaccttcatgggagaggaggcagctaccagggccctaggatgtccaggttgagtgttccttgtctgaagtacttcagaccagaagtatttgggatttggagatttttttgtttttttgtttttggattttggaatatttgcaaatatgcatatatatatatgtgtgtgtgtgtgtgtgtgtatacatacatacatatatatatacatatatatatatatatatagagagagagagagagagagagagagagagagagagagagagagggagacatctggaggagggggacccaaatctaaacatgaaatttatttatgtttcatatacactttatacacatagtctgagggtaattttatacaatattttaaagaactttatacacgaaacaacgttttgactgcaaccagtcacatgaggtcaggtgtggtattttccactggtgcttcatgttggtgcttataaagttttggattctagagcattttgggtattgtattttaggattagggatgttgaacctgtatttctctctgagtgtgttgttctgcctggcacgtgaattcttcctttggcatccagggcctgtaagcaacagatggggtatgcaaagggggtagtgcttcatgaagggcccccattaccgagatgtgggcaggacaagggagccaagagcagatggtgaagcacccagaggaccaacagtgaggggccatcatcatcctctgcccaagggagcaaaggaggacagggacgagctgtggatgctggggacttgatggggactatgggctgggagagaactacgagaataacaatcctgactactctcttctttcactctttaacttcctgccattggccaaatccacctggaagccagaggggaaaggagccaggtccggcctcctggggcacaaactaggggcagtgggtgtgtagagctggatcagggtaaaaaggagaatttctagcacattcagttttttctttcttttcttttctttttttttttttttcttgagatagtgtctcccttggtctcccaggctggtgtgtagtgatgcaatcataactcactgcagcctcgaccttccaggctcaagagattctcctgcttcagtctccagagtagctgggactatagacacatgccaccacaccagctaatgtttgtacttttattttttgtagcgacaaggtctcactgtgttgcctaggcttccctcaagctcctggcctcaagtgatcctcctgcctcagcctcctaaagtatgttgtcctttttaaaatacagaacaaagcttgtttcctttgttttacagaaatagattatttggaaatccaggaaaagtagatcctgccaataattaggtcctgtttagaaactcattagcagaagactttgctctgggaaagagttgcggccttcccattttatgaaggtttactgttctctacatttaatttaacttttttatttctttaatttaaaaaaacgtactaatatttagctaccaagtattggatcattttatcctgttctgtttcaaacacctggaaggtaatttctaaagctcttttctctggtgattactggagaggtagattactggaaatgcgttgagcttgtccagctattgagaaggtcactgttgactcccgtgtgtcctcactccatggcggggcagggagagtgacggagcagcaggcagccacaactgctttgttcccaaatgtcaaggcattgggttgtcaataaaaaaacgttctttcattttcccatgcaaagtgccctcaggtagagatgccaacggatggaacatatgagcaacaaatgatttgttaacttcacagactcttgccagaataaacaagagaagtggcagtgagtgctctacccagagccccctctggaatctcagcatgagacttcacacattacaacccttctgacaagggttgtacaaggtctccacatctttgcctcaagtggagctggctccaggacatgtggttctgctctgatgactgtctgttccatttgcatgtggtctttgtcgtcatatcattgttagatgttactgacgtgagcttgtctgctcccagcctcaggacgcctgtggctttcttggtttcccctactttcatggtctgatgcatgggtgcatccttcttgttttgtctccatttccacaagattatgtagaagcgcgttcattcattcaatgtatatttattggacacccactgtgtgtcactcattatgtgttctggaacataaggacaaggaacaaagaaggaaaagtccttccatgcatggagtttccattggggtggtgggggctggtggtgaagacaaacaaaaacatgcacaaataaatgtaaagtatgctcgaaagtgatacagaaaaaaaatgaacaaggtgagagggatgacaagttggggggagtttggagggcttgctttttaaggccaaggttgaggtgacatttgagcagtctctgaaggagggagggagggagccatggagagttctgaggaagagcatccaggcagaggggcagcaaaggccagggatggaagcacgcttggtgtgtccagagaatggcacagagggtcagtgtggctggagcagaatgagggaggaggagaggagttggagggacgtcaaaggtcgtggggaaccaggtctcttagggtcttgggggctggtggaggtcttctgcattcactgtggagtggagagccgcctcttgcttcctgtgaccaggcatacattgttaaaggatcaaccagaatgttggattgataataaaatgtagtgggcaagagtggaaggtgaaagactccagagagtattataataatggtggctcagttcagagcagtaacaggggcagggtgaggcggtatctgattccggacatggtttgccttcttgcaggattgactggacatggtttgaattggtgacaacaccctgaaggagtggatgtgggtgagaaagagcaatagaagactctgcaattcctggcctgagcagttgtaggagaaggtgaggggcgggtggagtgagcttcatgggagaccgggtgtcctgtgttggaagtgctcattttgagatgtgtcctgggtgtcccagttgagatcatgagtaggatgataataagagtgtgtgcatctggagttcaggctgcaggtcaaggctggagataccaaggggggactgggaggaagacagaagcttatattgacagccatgaagtggaggggattccccacaggagcaagcgtaagcagagagaggactaagagcccagcccaggctctgcgaggagccagcagaggaggctcggaggagcagccatcgaggcgggaggaggatcaggagaggtggcctgaaagttgggcaccagggaggcgggagtgagcagtgggttgcaggctgtggatgcatcaggcgactccaaggccattagtgacatggacaggaagagttgtggtgctggtaggaacaaaattctgattgtaatgggtccaaaagaggatggaaggggaaggattggaagcaaagcagattgataactctttttagttttgctacagaaaggtgaagtagtatagtagttcatagggaaaatgggaataagattttttttttactggttagaaataaaacgaaagtataataataaaaaaagaaaaaagcttgtttttatgctaatgaaatggtttcctgtttacctgaatgtattggctttacagagtcttttttctattcatattaactgatctgaatccatttcttgcactccttcattacatgagcataccttccctcctatcagtagagccggtcattattcctataggaaacacaacgagatgctctcaagtccagtttagttcagctattccttgggcacttataaatcatttcatatgctcaagaaagaagtttgtcacattactttggtcattataatgtttgattgttttattctatcatgaagctatgaaggctattttgtatgcagtattattgaatttgttgcctagtttgcagggcagtgagatatattgtggatttattcttctgggaacagataagatccctccttctgaatcttctgccccagaaatatttttcccccttcatagctaagtgactcaggtgagttagtttgtggttgaaaacatgttccttgattccaagtttgctgtttgcttcatctcatctacttaatacacagtgagtgctagccttttacctgtgctatttgaaggtcaaggctttgaccttggcagcatgtggggaccctctgtgagctgatgtatgtgaaattttgcttgttccaggttggaggcctgccatgttactggacacccctcgagctggttggaattagttttaatcatctgcagtctctacacatgattttaactcagaagggctccttaacacacatcacagaccattttacaccatgtttattgcagcaagagtctggggctaaccagatgacacactcgtcttctgaaacaaaatcgtgccttaggacggaaccatcttagttgcttgcagggatgcggtgctgttgtctcctggccagaggtttccctgggcagggctgggctgaggagggcctccaatcggtgggtctggacctgctcagactcctcagggctggtttctctttgtcccagaggaggtggtcagggacagtgaagagctgtggctgagccaattaaatggcccccagctgtccagggccctgatgtgggagaaacgcttatttccccattaaaggggaaaaagggcatctttgaagcaaccaggattttatgaatgtacttaaaaattatcctcttttatacagaagccatcttgaaagggctctcactggccaaatatggtatatttcaggagaggagataaaatataaatcttgggaaataagaatccatgatttcatacttataataaatagataaagcagtggagaagcaaatgtggaaggaggagggctcttgctttcagtagaacactgactattaactgctaaatgtggagaaggtgctgagttggaaactcataattttgtaactatcacagtaaagattggtctgataaaagtcatcagtagatgcaaaatccatgggaaagttttgatgaggatatttgcatggtcttcaaatgcctctcataagtgtacagtgggtaaatatgacagcaccttgactgaaacttccttgttaaagttaacatcaccaaggagaccgatggtcatggtgccctccacatgtgatacaccttcctttctgcagtattctggcaaggaaggcatgacttgaatctagttatgaggaagcaccagaaaaacccccaatgaggaacattctattgaagcaagggactgtgttcttccaaaatgctgaagttgtgaaagacaggaaggctgaggaatagctccacattagaggagaccagggaggtgggacagctaattaaccacacctgaatcagatcctgtactggagggagaagtgctttagtgcatattatcgggtcaattgacagtttgaaaatggacagaagtttagataaaagagttgtatcagtgataaacttactggaattgatgagtgtgctgtggtcatgttagggaattcctttattcctgggaaataagcattgaagtatttaagggtgaggggcaatgatgcttgctacctactctagaacagttcaggaaaaatggtatagatagatggatggatgagtggtggacagataggtaggtaggtaggtagatagagtagatatgattgatagatggatagataggatagttggatgaatgcatagatagatgatagagagagataatagatagagatagaaatgatatagatagataaacagaatgctaacaaaaatgagtacaatattgacaataggtgaatcagggtaaagtgtttatgggagttccttgtacgattgttgtaatttttctacaagtttgaaattacttccctgcaaaaaatagaataaataaatcaggccccctttttattgactgattgatgccttctttcaggattgattgggcattggtccatctcaggccccatctttcatgctgtgagccacacagacaagctcctgattctcatgaagcttccattctagggggaggtgtcagaattaaggaataaacaaagaacaattagaaagcatctgattttgatcagtgttacggaaaaagggaatgaggaataggtcgtgatgggggtcgatgggaggcgtcctttggatcaggagccatgggaaaaggaatttgattgagggaaggagtcattcctataaccagccaaggaagaacattccaggcagagggaccagccgctgcaaaggcacccaagccggagggagacggaggtgcttgaggaacacagaaggacattgcagctggggattagggagagaaggagaagaattggagcgtcttgcagggctggaccatctaaggtcttgtctgccatggtaaggagtttagattttattctaagtagcagagggagtccatggaaggttggaagaatgaagtgacattaatgaattcatgtctccatatatcactctgattattgtgtggagcttgaattgtagtgggacactgagcaggaacagaagccagtgggccaccgctgtggcctctctggggacacagccaccccctcaacagggagcaaggcagctccctgagcccccttgccttgtttcccctcgccagccctcaccctcatggggttgatgtctttaggagtatagcatgattccggcacaccatctttttttatttcttttatatcaacacatgtctttagtgaagtcactcaatgcctttcagcaactctaaaaatttaccaggtttctttttccaacattactttgacacatgccaagaatgacaaaaatgcatctctcttcaactgacttctttctgctgttgagctgccttcagtcttgagcactggggaagaataaatagaaacccagaatgggactgaggagacccagttccacagggagaaaaccaccttgaggtttcagaagggtatttgggggttcccagcgctccctaaaataggagaggtggcaagaggaccttggtcccatgaacactccagcactacatgggatactctgaggacacagaggctgtggcttttcttgcctgttggtgggttctcttctctgcctctatcctgtgctaccagccaccctcattgagaatttggaattcttaagtctagggagccaggacaatttagggaggatgctctaaatagctttctggttttgtctcctcccagggtcagatgaactgaggtttttctttagcaggctaaaggggctgtgtctgggttcttgtggctaatagagggctgttttgttgtgggatcatcctgccagaaactgggagggccagggaagtgtccttcaaagctgtgagtgattctttaaagaggggcagtggttgtaaacccttcacacttcaagccatgtggctgtctgtctgtttatctgtcatctgtctgaggagtgaggggatgtgtagtgggacagtgggtgtccctggaaagaaatttatccctgacatcagtagt
